(19) United States
(12) Patent Application Publication
(10) Pub. No.: US 2023/0048025 A1
(43) Pub. Date: Feb. 16, 2023

(54) ADENO ASSOCIATED VIRAL VECTORS

(71) Applicant: OREGON HEALTH & SCIENCE UNIVERSITY, Portland, OR (US)

(72) Inventors: Hiroyuki Nakai, Portland, OR (US); Kei Adachi, Portland, OR (US)

(21) Appl. No.: 16/472,793

(22) PCT Filed: Dec. 21, 2017
(86) PCT No.: PCT/US2017/068050

§ 371 Date: Jun. 21, 2019

Related U.S. Application Data
(60) Provisional application No. 62/438,255, filed on Dec. 22, 2016.

(51) Int. Cl. C12N 15/86; C07K 14/005

(52) U.S. Cl. CPC C12N 15/86; C07K 14/005; C12N 2750/14143; C12N 2750/14122; C12N 2750/14171

(57) ABSTRACT

Recombinant adeno associated viral vectors are disclosed. These include AAV8 or AAV9 derived vectors that include capsid proteins with mutations that confer upon the vector particular characteristics such as the ability to transduce or avoid (detarget) particular tissues, to be retained longer in the blood, or to be internalized in a cell without viral expression.

### ACKNOWLEDGEMENT OF GOVERNMENT SUPPORT

[0001] This invention was made with the support of the United States government under the terms of grant number NS088399 awarded by the National Institutes of Health. The United States government has certain rights to this invention.

### FIELD

[0002] Generally, the field involves adeno associated viruses with engineered mutations in the capsid domain. More particularly, the field involves adeno associated viruses that target or avoid particular tissues.

### BACKGROUND

[0003] Recombinant adeno-associated virus (rAAV) is among the most promising vectors for in vivo gene delivery. The usefulness of rAAV vectors has been expanded since a number of naturally occurring new serotypes and subtypes were isolated from human and non-human primate tissues (Gao G et al, J Virol 78, 6381-6388 (2004) and Gao G P et al, Proc Natl Acad Sci USA 99, 11854-11859 (2002); both of which are incorporated by reference herein). Among the newly-identified AAV isolates, AAV serotype 8 (AAV8) and AAV serotype 9 (AAV9) have gained attention because rAAV vectors derived from these two serotypes can transduce various organs including the liver, heart, skeletal muscles and central nervous system with high efficiency following systemic administration (Ghosh A et al, Mol Ther 15, 750-755 (2007); Pacak C A et al, Circ Res 99, 3-9 (2006); Inagaki K et al, Mol Ther 14, 45-53 (2006); Zhu T et al, Circulation 112, 2650-2659 (2005); Wang Z et al, Nat Biotechnol 23, 321-328 (2005); Nakai H et al, J Virol 79, 214-224 (2005); and Foust K D et al, Nature Biotechnol 23, 321-328 (2009); all of which are incorporated by reference herein). This robust transduction by rAAV8 and 9 vectors has been presumed to be ascribed to strong tropism for these cell types, efficient cellular uptake of vectors, and/or rapid uncoating of virion shells in cells (Thomas C E et al, J Virol 78, 3110-3122 (2004); incorporated by reference herein). In addition, emergence of capsid-engineered rAAV with better performance has significantly broadened the utility of rAAV as a vector toolkit (Asokan A et al, Mol Ther 20, 699-708 (2012); incorporated by reference herein).

[0004] A proof-of-concept using rAAV-mediated gene therapy has been shown in many preclinical animal models of human diseases. Phase I/II clinical studies have shown promising results for the treatment for hemophilia B (Nathwani A C et al, N Engl J Med 71, 1994-2004 (2014); incorporated by reference herein); lipoprotein lipase deficiency (Carpentier A C et al, J Clin Endocrinol Metab 97, 1635-1644 (2012); incorporated by reference herein); Leber congenital amaurosis (Jacobson S G et al, Arch Ophthalmol 130, 9-24 (2012) and Pierce E A and Bennett J, Cold Spring Harb Perspect Med 5, a017285 (2015); both of which are incorporated by reference herein), among others (reviewed in Mingozzi F and High K A, Nat Rev Genet 12, 341-355 (2011); incorporated by reference herein). Despite this promise, human studies have also revealed unexpected issues and potential challenges in rAAV-mediated gene therapy (Manno C S et al, Nat Med 12, 342-347 (2006); incorporated by reference herein).

[0005] Although rAAV vectors have widely been used in preclinical animal studies and have been tested in clinical safety studies in many diseases, the current rAAV-mediated gene delivery systems face challenges, especially with regard to broader clinical applications, potentially due to a lack of understanding of the mechanisms of rAAV transduction in vivo. Mechanistic studies of the AAV capsid have been a significant challenge due to the multifunctional nature of the AAV viral capsid protein, mutants of which result in a wide array of phenotypes. Such phenotypes include efficiency of capsid assembly, ability to interact with AAV viral nonstructural proteins (i.e., Rep and AAP proteins), ability to interact with components in body fluid and extracellular matrix, blood clearance rates, vascular permeability, antigenicity, reactivity to neutralizing antibodies, tissue/organ/cell type tropism, efficiency of cell attachment and internalization, intracellular trafficking routes, virion uncoating rates, and so on. Even with information about the atomic structure of the AAV capsid, the relationships between mutations of the AAV capsid amino acid sequence and those of AAV phenotypes are difficult to predict. Many of these phenotypes have significant influences on the yield of rAAV vector production and the degree of efficiency in overcoming various barriers toward establishing infection/transduction; therefore, understanding of the capsid biology is imperative to improve the current system and develop novel vectors with desired properties.

### SUMMARY

[0006] Disclosed are AAV vectors comprising mutant capsid proteins with biological properties useful in clinical translation. Such vectors have particular characteristics such as detargeting the liver while transducing one or more tissues such as brain, heart, or skeletal muscle. Other such vectors detarget all of the brain, heart, lung, liver, kidney, spleen, intestine, pancreas, testis, muscle and fat. Such vectors can be engineered to have one or more additional capsid mutations that confer upon the vector the ability to transduce one or more of the above listed tissues or other tissues such as skin, glands, or other tissues. Other such vectors specifically target and transduce the heart but detarget all the brain, ling, liver, kidney, spleen, intestine, pancreas, testis, muscle and fat. Other such vectors are retained in the blood longer than vectors comprising an unmutated capsid. Other such vectors bind to cell surface galactose and are internalized. Some such vectors are internalized within the cell and their genomes degraded. Other such vectors are internalized within the cell and not degraded but do not express transgene products. Such vectors also include vectors of SEQ ID NO: 3-108 herein.

### BRIEF DESCRIPTION OF THE DRAWINGS

[0007] FIG. 1A is a graph showing transduction efficiencies of AAV9W22A/W23A in various tissues 6 weeks post injection determined by RNA Barcode-Seq. The transduction efficiency in each tissue is normalized by that of the wild-type AAV9. Error bars are mean±SEM (n=12).

[0008] FIG. 1B is an image of liver tissue and heart tissue eleven days post injection of the indicated constructs. Transduction efficiencies in the liver and heart were determined by X-Gal staining. Error bars are mean±SEM (n=3).

[0009] FIG. 1C is a graph showing double-stranded vector genome copy number for diploid equivalent (genomes per cell) in the heart as determined by quantitative PCR. Error bars are mean±SEM (n=3).

[0010] FIG. 1D is a graph showing double-stranded vector genome copy number for diploid equivalent (genomes per cell) in the liver as determined by quantitative PCR. Error bars are mean±SEM (n=3).

[0011] FIG. 1E is a graph showing transduction efficiencies in the heart determined by Xgal-staining of histological sections that are presented in FIG. 1B. Error bars are mean±SEM (n=3).

[0012] FIG. 2A is a graph showing transduction efficiencies of AAV9N272A in various tissues 6 weeks post injection determined by RNA Barcode-Seq. The transduction efficiency in each tissue is normalized by that of the wild-type AAV9. Error bars are mean±SEM (n=12).

[0013] FIG. 2B is a set of images showing liver-detargeting AAV9 mutants that transduce the brain at high levels. Double-stranded AAV-hSynl-GFP vector genome, packaged with 4 different capsids indicated in the figure (AAV9, AAV9N272A, AAV9-PHPB, AAV9N272A-PHPB) were injected into 8-week-old male C57BL/6 mice via the tail vein at a dose of 3x10e11 vg/mouse (n=2 or 3). AAV hSyn-GFP vector expresses GFP under the control of the human synapsin I gene enhancer-promoter. Eleven days post-injection, transduction efficiencies in neurons were determined by immunofluorescence microscopy using an anti-GFP antibody. Double-stranded vector genome copy numbers per diploid genomic equivalent (i.e., copy/cell) in the liver were determined by qPCR, and the results are shown in the figure. Values are mean±SD for triplicated samples or mean±|mean−each value| for duplicated samples.

[0014] FIG. 2C is a graph showing transduction efficiencies of various brain regions with the liver-detargeting AAV9 mutants that transduce the brain at high levels. The histological sections shown in FIG. 2B were assessed quantitatively in the following six brain regions (n=2 or 3): medial basal hypothalamus (MBH), cerebral cortex (CTX), hippocampus (Hc), caudate-putamen (CP), amygdala (Amyg) and thalamus (Thal). Error bars are SEM for triplicated samples or |mean−each value| for duplicated samples.

### SEQUENCE LISTING

[0015] SEQ ID NO: 1—AAV8 capsid:

[0016] SEQ ID NO: 2—AAV9 capsid

[0017] SEQ ID NO: 3-108 are mutant AAV8 or AAV9 vector capsids.

[0018] SEQ ID NO: 109 is a capsid from AAV-PHP.B with an N272A mutation.

### DETAILED DESCRIPTION

[0019] Disclosed herein are the results of comprehensive double alanine scanning of the entire protein sequence of capsid proteins from AAV8 and AAV9, and particular the biological properties of all resulting mutants, including tropism in mice, in vitro and in vivo transduction efficiency, and pharmacokinetic profiles following intravenous injection into mice. The biological properties were determined using AAV Barcode-Seq technology, described in Adachi et al, Nat Commun 5, 3075 (2014); incorporated by reference herein and include brain, heart, and muscle targeting and liver detargeting phenotypes, receptor binding, pharmacokinetics, and viral genome processing in the cell.

[0020] Included in this disclosure is a brain-targeting/liver-detargeting AAV9 vector that can transduce to the brain more than 10 times better than AAV9 while detargeting the liver following intravenous injection. This vector is termed AAV9-N272A-PHPB and includes an N272A mutation in the AAV9-PHPB capsid (described in Deverman et al, Nat Biotechnol 34, 204-209 (2016); which is incorporated by reference herein). An N272A mutation was introduced into AAV9-PHPB which transduces the brain very efficiently following intravenous injection of the vector. AAV9N272A-PHPB can transduce the brain more than 10 times better than the wild-type AAV9. Introduction of the N272 mutation resulted in >1000-fold less liver transduction compared to the wild-type AAV9 (FIG. 2).

[0021] AAV9N272A-PHPB represents an example of this type of knowledge-based approach, and similar approaches to create novel AAV capsids with combined phenotypes will be possible based on the information disclosed herein.

[0022] AAV vectors have widely been used in preclinical animal studies and have been used in clinical trials as promising gene delivery vehicles. Robust AAV serotypes such as AAV8 and AAV9 vectors can efficiently transduce various non-hepatic tissues such as the central nervous system, the heart and the muscle following intravenous injection of a high dose of vector and therefore has opened a new avenue for the treatment of various diseases involving the brain, heart and muscle that currently do not have effective therapies. However, the tropism of the currently available vectors is promiscuous even though the vectors can transduce the brain, heart, muscle and other organs efficiently following intravenous injection of the robust serotype vectors and their derived mutants. The problem of particular importance is that the vectors can inevitably be disseminated to the liver at high levels, which potentially causes various clinical problems including cytotoxic T lymphocyte (CTL)-induced hepatotoxicity and an increased risk of liver carcinogenesis. Therefore, liver-detargeting is very important for gene therapy for non-hepatic diseases. Disclosed herein are AAV capsid mutant vectors that can effectively transduce the target non-hepatic organs while detargeting the liver.

[0023] Disclosed herein is double alanine scanning of the entire regions of the AAV8 and AAV9 capsids using the AAV Barcode-Seq technology, and collected a comprehensive set of biological phenotypes of all the mutants.

[0024] Disclosed herein are liver-detargeting mutants that retain the ability to transduce the brain, heart, muscle and/or other non-hepatic organs at substantial levels comparable to the parental robust AAV serotypes. These include: AAV8G28A, AAV8P30A/K31A, AAV8P32A/P33A, AAV8T265A/S266A, AAV8T270A, AAV8N271A/D272A, AAV8N273A/T274A, AAV8Y275A/F276A, AAV8G277A/Y278A, AAV8S387A/Q388A, AAV8W505A, AAV8T506A, AAV8T528A/H529A, and AAV8K530A/D531A; and AAV9W22A/W23A, AAV9K258A/Q259A, AAV9S268A/S269S, and AAV9N272A. AAV8G28A and AAV8P30A/K31A efficiently transduce skeletal muscle while detargeting the liver. AAV9W22A and AAV9W22A/W23A all exclusively transduce the heart while detargeting the liver and other organs. AAV9N272A transduces to the brain comparably to the wild-type AAV9 while detargeting the liver.

[0025] Disclosed herein are AAV8 and AAV9 mutants that detarget all organs. These include AAV8W10A/L11A, AAV8G44A/L45A, AAV8V46A/L47A, AAV8P48A/G49A, AAV8Y50A/K51A, AAV8Y52A/L53A, AAV8G54A/P55A, AAV8F56A/N57A, AAV8G58A/L59A, AAV8D60A/K61A, AAV8D69A, AAV8E74A/H75A, AAV8D76A/K77A, AAV8Y79A, AAV8N88A/P89A, AAV8Y90A/L91A, AAV8R92A/Y93A, AAV8D97A, AAV8F100A/Q101A, AAV8V118A/F119A, AAV8K122A/K123A, AAV8K142A/K143A, AAV8R144A/P145A, AAV8R169A/K170A, AAV8R171A/L172A, AAV8N255A/H256A, AAV8K259A/Q260A, AAV8G267A/G268A, AAV81335A, AAV8L339A/T340A, AAV8L383A/N384A, AAV8N385A/G386A, AAV8G391A/R392A, AAV8D532A/E533A, AAV8S564A/E565A, AAV8E566A/E567A, AAV8T704A/S705A, AAV8N706A/Y707A, AAV8Y708A/K709A, AAV8S712A/V713A, AAV8V717A, AAV8P726A/R727A, AAV9W10A/L11A, AAV9G44A/L45A, AAV9V46A/L47A, AAV9P48A/G49A, AAV9Y50A/K51A, AAV9Y52A/L53A, AAV9G54A/P55A, AAV9G56A/N57A, AAV9G58A/L59A, AAV9G62A/E63A, AAV9D69A, AAV9E74A/H75A, AAV9D76A/K77A, AAV9Y79A, AAV9Y90A/L91A, AAV9K92A/Y93A, AAV9D97A, AAV9F100A/Q101A, AAV9V118A/F119A, AAV9K122A/K123A, AAV9K142A/K143A, AAV9R144A/P145A, AAV9K168A/K169A, AAV9R170A/L171A, AAV9G222A/S223A, AAV9N254A/H255A, AAV9N262A/S263A, AAV9T264A/S265A, AAV9G266A/G267A, AAV9N270A/D271A, AAV91334A, and AAV9L338A/T339A.

[0026] Disclosed herein are AAV mutants that can transduce the liver but detarget other organs. These include AAV8G86A/D87A and AAV8N94A/H95A. The AAV9 versions of these mutations (AAV9G84A/D85A and AAV9N94A/H95A) also transduce the liver but not as robustly as the AAV8 mutants.

[0027] Disclosed herein are AAV9N270A/D271A and AAV9N272A mutants which bind to the surface of CHO Pro5 cells but do not bind to the surface of CHO Lec2 cells indicating that these residues are responsible for binding to galactose. AAV9N270A/D271A detargets all organs. AAV9N272A allows efficient transduction to the brain while detargeting the liver.

[0028] Disclosed herein are a total of 35 AAV9 capsid mutants that bind to CHO Lec2 cells but transduce the cells at levels that are only less than 10% of the level of the wild-type AAV9. These mutants bind to terminal galactose in the cell surface glycan chains, but this binding does not result in the expression of viral genomes. These mutants are classified into two types (Type I and Type II) based on the quantity of viral genome DNA and viral genome transcripts recovered from the cells 2 days post-infection.

[0029] Type I AAV9 galactose binding mutants bind to cell surface galactose and can be internalized in the cell. However, the viral genomes become degraded resulting in the failure of viral genome expression. Such mutants include AAV9K258A/Q259A, AAV9N262A/S263A, AAV9T264A/S265A, AAV9G266A/G267A, and AAV9S268A/S269A.

[0030] Type II AAV9 galactose binding mutants bind to cell surface galactose and can be internalized in the cell. However, the majority of the viral genomes that enter the cell stay transcriptionally inactive by an unknown mechanism. Such mutants include AAV9W10A/L11A, AAV9G44A/L45A, AAV9V46A/L47A, AAV9P48A/G49A, AAV9Y50A/K51A, AAV9Y52A/L53A, AAV9G54A/P55A, AAV9G56A/N57A, AAV9G58A/L59A, AAV9D60A/K61A, AAV9G62A/E63A, AAV9N66A, AAV9D69A, AAV9E74A/H75A, AAV9D76A/K77A, AAV9Y79A, AAV9Q82A/L83A, AAV9G86A/D87A, AAV9N88A/P89A, AAV9Y90A/L91A, AAV9K92A/Y93A, AAV9N94A/H95A, AAV9D97A, AAV9F100A/Q101A, AAV9L104A/K105A, AAV9V118A/F119A, AAV9K122A/K123A, AAV9G222A/S223A, and AAV91334A, AAV9L338A/T339A.

[0031] Disclosed herein are AAV capsid mutants that result in slower clearance of vector particles from blood circulation relative to the wildtype. Such mutants have 10 and 2 times higher concentrations in the blood 24 hours after intravenous injection than the wild-type AAV8 and AAV9, respectively. These mutants detarget the liver and promote accumulation of transcriptionally inactive vector genome DNA in the spleen. It should be noted that many of these mutants detarget organs globally but some of the mutants still retain the ability to transduce non-hepatic organs as described above. Such mutants include AAV8T265A/S266A, AAV8G267A/G268A, AAV8T270A, AAV8N271A/D272A, AAV8N273A/T274A, AAV8L383A/N384A, AAV8N385A/G386A, AAV8S387A/Q388A, AAV8W505A, AAV8T506A, AAV8T528A/H529A, AAV8Y708A/K709A, AAV8P726A/R727A, AAV9G222A/S223A, AAV9N254A/H255A, AAV9K258A/Q259A, AAV9N262A/S263A, AAV9T264A/S265A, AAV9S268A/S269A, AAV9N270A/D271A, AAV9N272A, and AAV91334A.

[0032] The term “AAV vector” as used herein means any vector that comprises or derives from components of AAV and is suitable to infect mammalian cells, including human cells, of any of a number of tissue types, such as brain, heart, lung, skeletal muscle, liver, kidney, spleen, or pancreas, whether in vitro or in vivo. The term “AAV vector” may be used to refer to an AAV type viral particle (or virion) comprising at least a nucleic acid molecule encoding a protein of interest.

[0033] Additionally, the AAVs disclosed herein may be derived from various serotypes, including combinations of serotypes (e.g., “pseudotyped” AAV) or from various genomes (e.g., single-stranded or self-complementary). In particular embodiments, the AAV vectors disclosed herein may comprise desired proteins or protein variants. A “mutant” as used herein, refers to an amino acid sequence that is altered by one or more amino acids relative to one of the amino acid sequences disclosed in the Sequence Listing provided herein (each alteration can be referred to as a “mutation”). The mutant may have “conservative” mutations, wherein a substituted amino acid has similar structural or chemical properties. Such conservative mutations include the substitutions in the table below.

| Original Amino Acid | Conservative Substitutions |
|---|---|
| Ala | Ser |
| Arg | Lys |
| Asn | Gln, His |
| Asp | Glu |
| Cys | Ser |
| Gln | Asn |
| Glu | Asp |
| His | Asn, Gln |
| Ile | Leu, Val |
| Leu | Ile, Val |
| Lys | Arg, Gln, Glu |
| Met | Leu, Ile |
| Phe | Met, Leu, Tyr |
| Ser | Thr |
| Thr | Ser |
| Trp | Tyr |
| Tyr | Trp, Phe |
| Val | Ile, Leu |

[0034] Analogous minor variations may also include amino acid deletions or insertions, or both. Any of the variants described herein—even those comprising specified mutations—can be mutated by one or more amino acids relative to the protein described herein, provided that the mutated protein has the same or a similar phenotype to the protein described herein (e.g. as the result of a conservative mutation). One of skill in the art in light of this disclosure can create and test such mutated proteins for phenotype. Polynucleotides encoding the proteins of the present disclosure are not explicitly disclosed herein but can be readily inferred by one of skill in the art in light of this disclosure. The polynucleotides of the present disclosure can be composed of either RNA or DNA. The disclosure also encompasses those polynucleotides that are complementary in sequence to the polynucleotides disclosed herein.

[0035] Because of the degeneracy of the genetic code, a variety of different polynucleotide sequences can encode the proteins of the present disclosure. In addition, it is well within the skill of a person trained in the art to create alternative polynucleotide sequences encoding the same, or essentially the same, proteins disclosed herein. These alternative polynucleotide sequences are within the scope of the current disclosure. As used herein, references to “essentially the same” sequence refers to sequences which encode amino acid substitutions, deletions, additions, or insertions which do not eliminate or substantially alter the detectability or the activity of the polypeptide encoded by the polynucleotides of the present disclosure.

[0036] Polynucleotide and polypeptide sequences of the current disclosure can also be defined in terms of particular identity and/or similarity with certain polynucleotides and polypeptides described herein. The sequence identity will typically be greater than 60%, preferably greater than 75%, more preferably greater than 80%, even more preferably greater than 90%, and can be greater than 95%. The identity and/or similarity of a sequence can be 49, 50, 51, 52, 53, 54, 55, 56, 57, 58, 59, 60, 61, 62, 63, 64, 65, 66, 67, 68, 69, 70, 71, 72, 73, 74, 75, 76, 77, 78, 79, 80, 81, 82, 83, 84, 85, 86, 87, 88, 89, 90, 91, 92, 93, 94, 95, 96, 97, 98, or 99% identical as compared to a sequence disclosed herein. Unless otherwise specified, as used herein percent sequence identity and/or similarity of two sequence scan be determined using the algorithm of Karlin and Altschul (1990), modified as in Karlin and Altschul (1993). Such an algorithm is incorporated into the NBLAST and XBLAST programs of Altschul et al. (1990). BLAST searches can be performed with the NBLAST program, score=100, wordlength=12, to obtain sequences with the desired percent sequence identity. To obtain gapped alignments for comparison purposes, Gapped BLAST can be used as described in Altschul et al. (1997). When utilizing BLAST and Gapped BLAST programs, the default parameters of the respective programs (NBLAST and XBLAST) can be used.

[0037] Methods of producing AAV vectors as disclosed herein are well known in the art, including methods, for example, using packaging cells, auxiliary viruses or plasmids, and/or baculovirus systems (see, e.g., Samulski et al., J. Virology 63, 3822 (1989); Xiao et al., J. Virology 72, 2224 (1998); Inoue et al., J. Virol. 72, 7024 (1998); WO1998/022607; and WO2005/072364; all of which are incorporated by reference herein).

[0038] Methods of producing pseudotyped AAV vectors are also known (see, e.g., WO00/28004; incorporated by reference herein), as well as various modifications or formulations of AAV vectors, to reduce their immunogenicity upon in vivo administration (see, e.g., WO01/23001; WO00/73316; WO04/112727; WO05/005610; and WO99/06562; all of which are incorporated by reference herein). In some embodiments, AAV vectors can be prepared or derived from various serotypes of AAVs which may be mixed together or mixed with other types of viruses to produce chimeric (e.g., pseudotyped) AAV viruses.

[0039] In particular embodiments, the AAV vector can be a human serotype AAV vector. In such embodiments, a human AAV can be derived from any known serotype, e.g., from any one of serotypes 1-11, for instance from AAV1, AAV2, AAV4, AAV6, or AAV9. One example of such an AAV vector includes a vector comprising a nucleic acid molecule comprising an ITR and packaging sequence, operatively linked to a nucleic acid encoding an expression cassette for a protein of interest, and a nucleic acid encoding a protein of interest in an AAV9-de rived capsid that differs from SEQ ID NO: 1 or SEQ ID NO: 2 herein by one or more amino acids, including SEQ ID NOs: 3-109 as provided herein.

[0040] The AAV vectors disclosed herein can include a nucleic acid encoding a protein of interest. In various embodiments, the nucleic acid also may include one or more regulatory sequences allowing expression and, in some embodiments, secretion of the protein of interest, such as e.g., a promoter, enhancer, polyadenylation signal, an internal ribosome entry site (IRES), a sequence encoding a protein transduction domain (PTD), and the like. Thus, in some embodiments, the nucleic acid may comprise a promoter region operably linked to the coding sequence to cause or improve expression of the protein of interest in infected cells. Such a promoter may be ubiquitous, cell- or tissue-specific, strong, weak, regulated, chimeric, etc., for example to allow efficient and stable production of the protein in the infected tissue. The promoter may be homologous to the encoded protein, or heterologous, although generally promoters of use in the disclosed methods are functional in human cells. Examples of regulated promoters include, without limitation, Teton/off element-containing promoters, rapamycin inducible promoters, tamoxifen-inducible promoters, and metallothionein promoters. Other promoters that may be used include promoters that are tissue specific for tissues such as kidney, spleen, and pancreas. Examples of ubiquitous promoters include viral promoters, particularly the CMV promoter, the RSV promoter, the SV40 promoter, etc., and cellular promoters such as the PGK (phosphoglycerate kinase) promoter and the 3-actin promoter.

[0041] In some embodiments of the AAV vectors disclosed herein, one or more feedback elements may be used to dampen over-expression of the protein of interest. For example, some embodiments of the AAV vectors may include one or more siRNA sequences that would target the exogenous transcript. In other embodiments, the AAV vector may include one or more additional promoters that may be recognized by inhibitory transcription factors. In various embodiments, the AAV vectors disclosed herein may comprise a construct that may create a homoeostatic feedback loop that may maintain expression levels of the protein of interest at a physiological level.

[0042] In various embodiments, the AAV vectors disclosed herein can comprise a nucleic acid that may include a leader sequence allowing secretion of the encoded protein. In some embodiments, fusion of the transgene of interest with a sequence encoding a secretion signal peptide (usually located at the N-terminal of secreted polypeptides) may allow the production of the therapeutic protein in a form that can be secreted from the transduced cell. Examples of such signal peptides include the albumin, the β-glucuronidase, the alkaline protease or the fibronectin secretory signal peptides.

[0043] As described herein, effective and long term expression of the rapeutic proteins of interest in brain, heart, lung, skeletal muscle, kidney, spleen, or pancreas can be achieved with non-invasive techniques, through peripheral administration of certain AAV vectors, such as a non-AAV9 vector with AAV9 sequences. Such peripheral administration may include any administration route that does not necessitate direct injection into brain, heart, lung, skeletal muscle, kidney, spleen, or pancreas. More particularly, peripheral administration may include systemic injections, such as intramuscular, intravascular (such as intravenous) intraperitoneal, intra-arterial, or subcutaneous injections. In some embodiments, peripheral administration also may include oral administration (see, for instance, WO96/40954; incorporated by reference herein), delivery using implants, (see, for instance, WO01/91803; incorporated by reference herein), or administration by instillation through the respiratory system, e.g., using sprays, aerosols or any other appropriate formulations.

[0044] In various embodiments, the desired doses of the AAV vectors may be easily adapted by the skilled artisan, e.g., depending on the disease condition, the subject, the treatment schedule, etc. In some embodiments, from 10⁵ to 10¹² viral genomes are administered per dose, for example, from 10⁶ to 10¹¹, from 10⁷ to 10¹¹, or from 10⁸ to 10¹¹. In other embodiments, exemplary doses for achieving the rapeutic effects may include virus titers of at least about 10⁵, 10⁶, 10⁷, 10⁸, 10⁹, 10¹⁰ or 10¹¹ viral genomes or more. Virus titer may also be expressed in terms of transducing units, which may be readily calculated by those of skill in the art.

[0045] In various embodiments, the AAV vectors disclosed herein may be administered in any suitable form, for instance, either as a liquid solution or suspension, as a solid form suitable for solution or suspension in liquid prior to injection, as a gel or as an emulsion. The vectors may be formulated with any appropriate and pharmaceutically acceptable excipient, carrier, adjuvant, diluent, etc. For instance, for injection, a suitable carrier or diluent may be an isotonic solution, a buffer, sterile and pyrogen-free water, or, for instance, a sterile and pyrogen-free phosphate buffered saline solution. For inhalation, the carrier may be in particulate form.

[0046] The vectors may be administered in a “therapeutically-effective” amount, e.g., an amount that is sufficient to alleviate (e.g., decrease, reduce) at least one of the symptoms associated with a disease state, or to provide improvement in the condition of the subject. In some embodiments, repeated administrations may be performed, for instance using the same or a different peripheral administration route and/or the same vector or a distinct vector.

[0047] To better understand AAV capsid biology, a novel comprehensive high-throughput reverse genetics method was established that integrates DNA barcoding and next generation sequencing technologies. This approach has been termed “AAV Barcode-Seq”. DNA-barcoded AAV capsid libraries with defined capsid mutations are generated and amino acid sequence.

[0048] AAV capsid phenotype relationship data is collected in vitro and in vivo. A number of amino acids that play important roles in capsid assembly, receptor binding, tropism, blood clearance rates and antibody recognition have been identified (Adachi K et al, Nat Commun 5, 3075 (2014); WO 2013-159036; and WO 2013-170078, all of which are incorporated by reference herein). Disclosed herein is a more advanced approach that uses DNA/RNA-barcoded AAV libraries. In this new approach, DNA barcodes are expressed as RNA barcodes under the control of the human U6 snRNA RNA polymerase Ill promoter. By analyzing the quantity of expressed RNA barcodes by reverse transcription (RT)-PCR, viral gene expression can be quantified. Such expression is important for assessment of AAV vector transduction (i.e., gene delivery resulting in vector genome expression) because viral genome DNA and viral genome transcripts can be discordant.

[0049] In earlier work, pharmacokinetic profiles as well as in vivo transduction efficiency of various AAV serotypes and capsid-modified variants and mutants administered intravenously in mice were established (Kotchey N M et al, Mol Ther 19, 1079-1089 (2011); incorporated by reference herein). Rapid clearance of exogenous agents from the bloodstream primarily by Kupffer cells in the liver has been a major hurdle in systemic treatments with such agents. This is particularly the case with adenoviral vectors and cationic non-viral vectors (Alemany R et al, J Gen Virol 81, 2605-2609; 2000; Fenske D B et al, Curr Opin Mol Ther 3, 153-158 (2001); Li S D and Huang L, Gene Ther 13, 1313-1319 (2006); Manickan E et al, Molt her 13, 108-117; 2006; Schagen F H et al, Hum Gene Ther 19, 783-794 (2008); Shayakhmetov D M et al, J Virol 78, 5368-5381 (2004); Tao N et al, Mol Ther 3, 28-35 (2001); Xu Z L et al, Adv Drug Deliv Rev 57, 781-802 (2005); all of which are incorporated by reference herein.

### EXAMPLES

[0050] The following examples are for illustration only. In light of this disclosure, those of skill in the art will recognize that variations of these examples and other examples of the disclosed invention be possible without undue experimentation.

### Example 1—AAV Barcode-Seq Data Showing the Biological Phenotypes of AAV8 Alanine Mutants

[0051] Two DNA/RNA-barcoded AAV libraries containing AAV8 double alanine mutants and reference controls AAV9, AAV8 and AAV2R585E, (AAV Stock Identification Numbers (IDs) 538 and 539) were injected into 8-week-old C57BL/6 male mice. For the tissue transduction analysis (n=3 per library), the mice were injected with each AAV library at a dose of 2×10¹³ vector genome (vg) per mouse. Total DNA and total RNA were extracted from eleven major tissues collected 6 weeks post-injection, and subjected to the DNA Barcode-Seq and RNA Barcode-Seq analyses. The vector genomes packaged in this library express viral clone-specific 12 nucleotide-long RNA barcodes under the control of the human U6 small nuclear RNA gene promoter. This allows us to analyze quantitatively vector genome DNA copy numbers and vector genome RNA transcripts in samples by Illumina barcode sequencing. For the pharmacokinetic analysis (n=2 per library), the mice were injected with each AAV library at a dose of 1×10¹³ vg per mouse. Blood samples were collected 1 min, 10 min, 30 min, 1 h, 4 h, 8 h, 24 h and 72 h post injection, and subjected to the DNA Barcode-Seq analysis to quantify viral genome copy numbers in the blood samples. These two libraries coverall the capsid outer surface-exposed amino acids. The mutants that do not produce viable virions were excluded from the analysis. The values in the table represent the averages from replicated experiments. All the values are normalized with the values obtained from AAV8, one of the reference controls.

[0052] A DNA/RNA-barcoded AAV library containing AAV9 double alanine mutants and reference controls AAV9 and AAV2R585E, (AAV Stock ID 507) was injected into 8-week-old C57BL/6 male mice. For the tissue transduction analysis (n=3), the mice were injected with the AAV library at a dose of 2×10¹³ vg per mouse. Total DNA and total RNA were extracted from eleven major tissues collected 6 weeks post-injection and subjected to the DNA Barcode-Seq and RNA Barcode-Seq analyses. For the pharmacokinetic analysis (n=2), the mice were injected with the AAV library at a dose of 1×10¹³ vg per mouse. Blood samples were collected 1 min, 10 min, 30 min, 1 h, 4 h, 8 h, 24 h and 72 h post injection, and subjected to the DNA Barcode-Seq analysis to quantify viral genome copy numbers in the blood samples. For the in vitro cell surface binding and transduction assays, each library was applied on the cells of interest at a multiplicity of infection (MOI) of 10⁴ and subjected to the procedure described in Adachi et al 2014 supra.

[0053] The library covers the N-terminal half of the AAV9 capsid. The DNA Barcode-Seq data for the C-terminal half of the AAV9 capsid was published in Adachi et al 2014 supra. The mutants that do not produce viable virions were excluded from the analysis. The values in the table represent the averages from replicated experiments. All the values are normalized with the values obtained from AAV9, one of the reference controls.

[0054] Table 1 shows AAV8 capsid mutants with liver transduction efficiencies less than 10% of the wild-type AAV8 identified via RNA Barcode-Seq (units in vector genome expression per tissue relative to the wild-type AAV8). Liver detargeting mutants that can also transduce non-hepatic organs to are shaded. Abbreviations: Br=brain, H=heart, Lu=lung, Lv=liver, K=kidney, S=spleen, I=intestine, T=testis, M=skeletal muscle, F=fat

| Mutation | Br | H | Lu | Lv | K | S | I | T | M | F |
|---|---|---|---|---|---|---|---|---|---|---|
| AAV9 wt | 3.66 | 1.25 | 1.19 | 0.28 | 1.21 | 1.14 | 2.00 | 1.09 | 0.37 | 1.14 |
| R585E | 1.89 | 0.63 | 0.21 | 0.01 | 0.12 | 0.04 | 0.32 | 0.06 | 0.02 | 0.05 |
| AAV8 wt | 1.00 | 1.00 | 1.00 | 1.00 | 1.00 | 1.00 | 1.00 | 1.00 | 1.00 | 1.00 |
| W10A/L11A | 0.00 | 0.12 | 0.00 | 0.00 | 0.00 | 0.00 | 0.00 | 0.00 | 0.00 | 0.01 |
| P48A/G49A | 0.00 | 0.05 | 0.00 | 0.00 | 0.00 | 0.00 | 0.00 | 0.00 | 0.00 | 0.00 |
| Y50A/K51A | 0.00 | 0.03 | 0.00 | 0.00 | 0.01 | 0.00 | 0.00 | 0.00 | 0.00 | 0.01 |
| Y52A/L53A | 0.00 | 0.01 | 0.00 | 0.00 | 0.00 | 0.00 | 0.00 | 0.00 | 0.00 | 0.00 |
| G54A/P55A | 0.00 | 0.02 | 0.00 | 0.00 | 0.00 | 0.00 | 0.00 | 0.00 | 0.00 | 0.00 |
| F56A/N57A | 0.00 | 0.04 | 0.00 | 0.00 | 0.00 | 0.00 | 0.00 | 0.00 | 0.00 | 0.00 |
| G58A/L59A | 0.00 | 0.03 | 0.00 | 0.00 | 0.00 | 0.00 | 0.00 | 0.00 | 0.00 | 0.03 |
| D69A | 0.00 | 0.01 | 0.00 | 0.00 | 0.00 | 0.00 | 0.00 | 0.00 | 0.00 | 0.00 |
| E74A/H75A | 0.00 | 0.04 | 0.00 | 0.00 | 0.00 | 0.00 | 0.00 | 0.00 | 0.00 | 0.00 |
| D76A/K77A | 0.00 | 0.02 | 0.00 | 0.00 | 0.00 | 0.00 | 0.00 | 0.00 | 0.00 | 0.01 |
| Y79A | 0.00 | 0.01 | 0.01 | 0.00 | 0.00 | 0.00 | 0.00 | 0.00 | 0.00 | 0.01 |
| Y90A/L91A | 0.00 | 0.01 | 0.00 | 0.00 | 0.00 | 0.00 | 0.00 | 0.00 | 0.00 | 0.00 |
| D97A | 0.00 | 0.02 | 0.00 | 0.00 | 0.00 | 0.00 | 0.00 | 0.00 | 0.00 | 0.00 |
| F100A/Q101A | 0.00 | 0.01 | 0.00 | 0.00 | 0.00 | 0.00 | 0.00 | 0.00 | 0.00 | 0.00 |
| V118A/F119A | 0.00 | 0.03 | 0.00 | 0.00 | 0.01 | 0.00 | 0.00 | 0.00 | 0.00 | 0.01 |
| K122A/K123A | 0.00 | 0.02 | 0.00 | 0.00 | 0.00 | 0.00 | 0.00 | 0.00 | 0.00 | 0.00 |
| K142A/K143A | 0.00 | 0.01 | 0.00 | 0.00 | 0.00 | 0.00 | 0.00 | 0.00 | 0.00 | 0.00 |
| R144A/P145A | 0.00 | 0.00 | 0.00 | 0.00 | 0.00 | 0.00 | 0.00 | 0.00 | 0.00 | 0.00 |
| R169A/K170A | 0.00 | 0.04 | 0.01 | 0.00 | 0.01 | 0.01 | 0.01 | 0.01 | 0.00 | 0.01 |
| R171A/L172A | 0.00 | 0.02 | 0.01 | 0.00 | 0.01 | 0.01 | 0.01 | 0.01 | 0.00 | 0.01 |
| T265A/S266A | 0.49 | 0.58 | 0.19 | 0.00 | 0.17 | 0.03 | 0.45 | 0.06 | 0.06 | 0.32 |
| G267A/G268A | 0.00 | 0.11 | 0.02 | 0.00 | 0.02 | 0.00 | 0.01 | 0.01 | 0.00 | 0.02 |
| N273A/T274A | 0.07 | 0.20 | 0.12 | 0.00 | 0.11 | 0.02 | 0.23 | 0.03 | 0.04 | 0.09 |
| Y275A/F276A | 0.06 | 0.31 | 0.10 | 0.00 | 0.06 | 0.08 | 0.08 | 0.06 | 0.02 | 0.07 |
| G277A/Y278A | 0.00 | 0.33 | 0.18 | 0.00 | 0.21 | 0.25 | 0.31 | 0.25 | 0.02 | 0.30 |
| L383A/N384A | 0.00 | 0.02 | 0.00 | 0.00 | 0.02 | 0.00 | 0.12 | 0.00 | 0.00 | 0.02 |
| N385A/G386A | 0.12 | 0.15 | 0.06 | 0.00 | 0.04 | 0.01 | 0.15 | 0.02 | 0.03 | 0.09 |
| G391A/R392A | 0.00 | 0.00 | 0.00 | 0.00 | 0.00 | 0.00 | 0.00 | 0.00 | 0.00 | 0.03 |
| T704A/S705A | 0.02 | 0.01 | 0.00 | 0.00 | 0.04 | 0.00 | 0.00 | 0.00 | 0.00 | 0.02 |
| N706A/Y707A | 0.00 | 0.00 | 0.00 | 0.00 | 0.00 | 0.00 | 0.01 | 0.00 | 0.00 | 0.00 |
| Y708A/K709A | 0.00 | 0.28 | 0.07 | 0.00 | 0.05 | 0.03 | 0.14 | 0.02 | 0.02 | 0.06 |
| P726A/R727A | 0.20 | 0.02 | 0.01 | 0.00 | 0.02 | 0.00 | 0.01 | 0.00 | 0.01 | 0.04 |
| W22A/W23A | 0.00 | 0.25 | 0.00 | 0.01 | 0.03 | 0.03 | 0.00 | 0.00 | 0.01 | 0.07 |
| G44A/L45A | 0.00 | 0.03 | 0.00 | 0.01 | 0.00 | 0.00 | 0.00 | 0.00 | 0.00 | 0.00 |
| V46A/L47A | 0.00 | 0.01 | 0.00 | 0.01 | 0.00 | 0.00 | 0.00 | 0.00 | 0.00 | 0.00 |
| R92A/Y93A | 0.00 | 0.01 | 0.00 | 0.01 | 0.01 | 0.00 | 0.00 | 0.00 | 0.00 | 0.01 |
| T270A | 0.18 | 0.40 | 0.13 | 0.01 | 0.24 | 0.05 | 0.56 | 0.05 | 0.02 | 0.19 |
| L339A/T340A | 0.00 | 0.00 | 0.00 | 0.01 | 0.01 | 0.00 | 0.01 | 0.00 | 0.00 | 0.01 |
| W505A | 0.41 | 0.57 | 0.15 | 0.01 | 0.19 | 0.05 | 0.46 | 0.09 | 0.11 | 0.22 |
| D532A/E533A | 0.01 | 0.15 | 0.06 | 0.01 | 0.16 | 0.01 | 0.49 | 0.05 | 0.09 | 0.14 |
| S564A/E565A | 0.01 | 0.00 | 0.01 | 0.01 | 0.01 | 0.01 | 0.06 | 0.00 | 0.00 | 0.01 |
| N271A/D272A | 0.75 | 0.86 | 0.19 | 0.02 | 0.24 | 0.07 | 0.48 | 0.16 | 0.04 | 0.25 |
| S387A/Q388A | 0.26 | 0.86 | 0.19 | 0.02 | 0.33 | 0.10 | 0.43 | 0.07 | 0.15 | 0.33 |
| T528A/H529A | 0.28 | 0.84 | 0.17 | 0.03 | 0.36 | 0.30 | 0.20 | 0.06 | 0.16 | 0.29 |
| E566A/E567A | 0.01 | 0.01 | 0.01 | 0.03 | 0.01 | 0.01 | 0.01 | 0.01 | 0.00 | 0.01 |
| I335A | 0.01 | 0.04 | 0.03 | 0.04 | 0.02 | 0.01 | 0.05 | 0.05 | 0.02 | 0.04 |
| D60A/K61A | 0.00 | 0.05 | 0.01 | 0.05 | 0.02 | 0.02 | 0.02 | 0.04 | 0.03 | 0.19 |
| N255A/H256A | 0.01 | 0.11 | 0.02 | 0.05 | 0.04 | 0.00 | 0.05 | 0.02 | 0.02 | 0.05 |
| V717A | 0.02 | 0.06 | 0.02 | 0.05 | 0.06 | 0.04 | 0.10 | 0.05 | 0.10 | 0.09 |
| K259A/Q260A | 0.00 | 0.21 | 0.06 | 0.06 | 0.02 | 0.04 | 0.18 | 0.06 | 0.03 | 0.11 |
| K530A/D531A | 1.29 | 0.96 | 0.28 | 0.07 | 0.40 | 0.21 | 1.12 | 0.41 | 0.19 | 0.54 |
| S712A/V713A | 0.00 | 0.00 | 0.04 | 0.07 | 0.10 | 0.04 | 0.01 | 0.07 | 0.05 | 0.13 |
| P32A/K33A | 0.26 | 0.50 | 0.40 | 0.08 | 0.36 | 0.47 | 0.40 | 0.22 | 0.44 | 0.50 |
| N88A/P89A | 0.06 | 0.06 | 0.01 | 0.09 | 0.02 | 0.01 | 0.05 | 0.01 | 0.01 | 0.19 |
| T506A | 1.52 | 1.57 | 0.63 | 0.10 | 0.75 | 0.40 | 2.03 | 0.42 | 0.36 | 0.87 |
| P30A/K31A | 0.83 | 0.94 | 0.74 | 0.13 | 0.70 | 0.74 | 0.61 | 0.46 | 0.76 | 0.80 |
| G28A | 0.44 | 0.81 | 0.47 | 0.14 | 0.56 | 0.63 | 0.72 | 0.61 | 0.91 | 0.79 |

Table 2 shows Liver detargeting AAV9 alanine mutants. AAV9 mutants with liver transduction values less than 10% of the wild-type AAV9 values are shown included. Liver detargeting mutants that can also transduce non-hepatic organs to are shaded. Abbreviations: same as for Table 1 except Pa=pancreas.

| Mutation | Br | H | Lu | Lv | K | S | I | Pa | T | M | F |
|---|---|---|---|---|---|---|---|---|---|---|---|
| wild-type | 1.00 | 1.00 | 1.00 | 1.00 | 1.00 | 1.00 | 1.00 | 1.00 | 1.00 | 1.00 | 1.00 |
| R585E | 0.41 | 0.35 | 0.16 | 0.01 | 0.14 | 0.04 | 0.13 | 0.00 | 0.03 | 0.12 | 0.03 |
| K142A/K143A | 0.00 | 0.00 | 0.00 | 0.00 | 0.00 | 0.00 | 0.00 | 0.00 | 0.00 | 0.00 | 0.00 |
| R144A/P145A | 0.00 | 0.00 | 0.00 | 0.00 | 0.00 | 0.00 | 0.00 | 0.00 | 0.00 | 0.00 | 0.00 |
| K122A/K123A | 0.00 | 0.00 | 0.00 | 0.00 | 0.01 | 0.00 | 0.00 | 0.00 | 0.00 | 0.00 | 0.00 |
| K168A/K169A | 0.00 | 0.00 | 0.00 | 0.00 | 0.00 | 0.00 | 0.00 | 0.00 | 0.00 | 0.00 | 0.00 |
| W10A/L11A | 0.00 | 0.07 | 0.00 | 0.00 | 0.00 | 0.01 | 0.00 | 0.00 | 0.00 | 0.03 | 0.01 |
| L338A/T339A | 0.00 | 0.00 | 0.00 | 0.00 | 0.00 | 0.00 | 0.00 | 0.00 | 0.01 | 0.00 | 0.00 |
| P48A/G49A | 0.00 | 0.00 | 0.00 | 0.00 | 0.00 | 0.00 | 0.00 | 0.00 | 0.00 | 0.00 | 0.00 |
| D69A | 0.00 | 0.00 | 0.00 | 0.00 | 0.00 | 0.00 | 0.00 | 0.00 | 0.00 | 0.00 | 0.00 |
| D76A/K77A | 0.00 | 0.00 | 0.00 | 0.00 | 0.00 | 0.00 | 0.00 | 0.00 | 0.00 | 0.00 | 0.00 |
| G222A/S223A | 0.00 | 0.00 | 0.00 | 0.00 | 0.00 | 0.00 | 0.00 | 0.00 | 0.00 | 0.00 | 0.00 |
| Y50A/K51A | 0.00 | 0.00 | 0.01 | 0.00 | 0.00 | 0.00 | 0.00 | 0.00 | 0.00 | 0.00 | 0.00 |
| G54A/P55A | 0.00 | 0.00 | 0.00 | 0.00 | 0.01 | 0.00 | 0.00 | 0.00 | 0.00 | 0.00 | 0.00 |
| G56A/N57A | 0.00 | 0.00 | 0.00 | 0.00 | 0.00 | 0.00 | 0.00 | 0.00 | 0.00 | 0.00 | 0.00 |
| E74A/H75A | 0.00 | 0.00 | 0.00 | 0.00 | 0.00 | 0.00 | 0.00 | 0.00 | 0.00 | 0.00 | 0.00 |
| Y79A | 0.00 | 0.00 | 0.00 | 0.00 | 0.00 | 0.00 | 0.01 | 0.00 | 0.00 | 0.00 | 0.00 |
| D97A | 0.00 | 0.00 | 0.00 | 0.00 | 0.00 | 0.00 | 0.00 | 0.00 | 0.00 | 0.00 | 0.00 |
| N262A/S263A | 0.10 | 0.19 | 0.07 | 0.00 | 0.06 | 0.01 | 0.08 | 0.00 | 0.03 | 0.09 | 0.01 |
| T264A/S265A | 0.04 | 0.10 | 0.02 | 0.00 | 0.03 | 0.01 | 0.01 | 0.01 | 0.01 | 0.07 | 0.01 |
| G266A/G267A | 0.01 | 0.01 | 0.01 | 0.00 | 0.00 | 0.01 | 0.01 | 0.01 | 0.00 | 0.00 | 0.01 |
| Y90A/L91A | 0.00 | 0.00 | 0.00 | 0.01 | 0.00 | 0.00 | 0.00 | 0.00 | 0.00 | 0.00 | 0.00 |
| V46A/L47A | 0.00 | 0.00 | 0.00 | 0.01 | 0.00 | 0.00 | 0.00 | 0.00 | 0.00 | 0.00 | 0.00 |
| Y52A/L53A | 0.00 | 0.00 | 0.01 | 0.01 | 0.00 | 0.00 | 0.00 | 0.00 | 0.00 | 0.00 | 0.00 |
| K92A/Y93A | 0.00 | 0.00 | 0.00 | 0.01 | 0.00 | 0.00 | 0.00 | 0.00 | 0.00 | 0.00 | 0.00 |
| F100A/Q101A | 0.00 | 0.00 | 0.00 | 0.01 | 0.00 | 0.00 | 0.00 | 0.00 | 0.00 | 0.00 | 0.00 |
| N270A/D271A | 0.01 | 0.05 | 0.01 | 0.01 | 0.01 | 0.01 | 0.01 | 0.01 | 0.01 | 0.02 | 0.01 |
| W22A/W23A | 0.03 | 0.51 | 0.03 | 0.01 | 0.02 | 0.09 | 0.02 | 0.07 | 0.01 | 0.07 | 0.05 |
| V118A/F119A | 0.00 | 0.02 | 0.00 | 0.01 | 0.00 | 0.00 | 0.00 | 0.00 | 0.00 | 0.01 | 0.01 |
| G44A/L45A | 0.00 | 0.00 | 0.00 | 0.01 | 0.00 | 0.00 | 0.00 | 0.00 | 0.00 | 0.00 | 0.00 |
| S268A/S269A | 0.22 | 0.26 | 0.12 | 0.01 | 0.07 | 0.02 | 0.13 | 0.01 | 0.03 | 0.15 | 0.06 |
| G58A/L59A | 0.00 | 0.01 | 0.01 | 0.01 | 0.00 | 0.00 | 0.00 | 0.00 | 0.00 | 0.01 | 0.01 |
| I334A | 0.01 | 0.03 | 0.02 | 0.02 | 0.02 | 0.02 | 0.02 | 0.00 | 0.02 | 0.01 | 0.03 |
| K258A/Q259A | 0.28 | 0.30 | 0.20 | 0.03 | 0.24 | 0.06 | 0.42 | 0.01 | 0.10 | 0.26 | 0.15 |
| N272A | 0.96 | 0.57 | 0.28 | 0.05 | 0.25 | 0.12 | 0.50 | 0.02 | 0.10 | 0.23 | 0.13 |
| G62A/E63A | 0.06 | 0.05 | 0.02 | 0.06 | 0.01 | 0.01 | 0.02 | 0.00 | 0.02 | 0.04 | 0.09 |
| R170A/L171A | 0.01 | 0.09 | 0.09 | 0.08 | 0.12 | 0.06 | 0.05 | 0.09 | 0.09 | 0.14 | 0.20 |
| N254A/H255A | 0.08 | 0.17 | 0.09 | 0.09 | 0.04 | 0.06 | 0.07 | 0.03 | 0.05 | 0.05 | 0.16 |

Table 3 shows mutants that are deficient in galactose binding. Indicated are AAV9 mutants that bind to Pro5 cells at a level comparable to the wild-type AAV9, but bind to Lec2 cells at less than 5% of the wild-type AAV9.

| | Cell binding | | | Transduction (DNA) | | | Transduction (RNA) | | |
|---|---|---|---|---|---|---|---|---|---|
| Mutation | Pro5 | Lec2 | 293 | Pro5 | Lec2 | 293 | Pro5 | Lec2 | 293 |
| wild-type | 1.00 | 1.00 | 1.00 | 1.00 | 1.00 | 1.00 | 1.00 | 1.00 | 1.00 |
| R585E | 1.37 | 0.04 | 0.56 | 0.43 | 0.10 | 0.80 | 0.02 | 0.01 | 0.76 |
| N272A | 0.98 | 0.03 | 0.88 | 0.11 | 0.04 | 0.29 | 0.01 | 0.01 | 0.19 |
| N270A/D271A | 0.96 | 0.03 | 1.60 | 0.17 | 0.06 | 0.29 | 0.00 | 0.00 | 0.00 |

Table 4 shows mutants that are deficient in post cell surface binding in CHO Lec2 cell transduction. AAV9 Type I galactose binding mutants as described herein are shaded. The other mutants (other than R585E) are AAV9 Type II galactose binding mutants as described herein.

| | Cell binding | | | Transduction (DNA) | | | Transduction (RNA) | | |
|---|---|---|---|---|---|---|---|---|---|
| Mutation | Pro5 | Lec2 | 293 | Pro5 | Lec2 | 293 | Pro5 | Lec2 | 293 |
| wild-type | 1.00 | 1.00 | 1.00 | 1.00 | 1.00 | 1.00 | 1.00 | 1.00 | 1.00 |
| R585E | 1.37 | 0.04 | 0.56 | 0.43 | 0.10 | 0.80 | 0.02 | 0.01 | 0.76 |
| T264A/S265A | 0.89 | 1.00 | 0.90 | 0.19 | 0.09 | 0.47 | 0.00 | 0.00 | 0.00 |
| G266A/G267A | 0.98 | 1.01 | 1.05 | 0.22 | 0.11 | 0.49 | 0.00 | 0.00 | 0.00 |
| D76A/K77A | 1.05 | 1.10 | 0.90 | 1.85 | 2.11 | 1.33 | 0.00 | 0.00 | 0.00 |
| V46A/L47A | 0.99 | 1.04 | 0.91 | 1.93 | 2.32 | 1.47 | 0.00 | 0.00 | 0.01 |
| G54A/P55A | 1.01 | 1.02 | 0.99 | 1.80 | 2.22 | 1.32 | 0.00 | 0.01 | 0.00 |
| L338A/T339A | 0.94 | 0.91 | 3.01 | 0.38 | 0.43 | 0.56 | 0.01 | 0.01 | 0.00 |
| N94A/H95A | 0.95 | 0.95 | 1.02 | 1.98 | 2.39 | 1.44 | 0.00 | 0.01 | 0.00 |
| K92A/Y93A | 1.03 | 1.02 | 1.04 | 1.92 | 2.35 | 1.48 | 0.00 | 0.01 | 0.01 |
| D69A | 1.01 | 1.05 | 1.08 | 1.82 | 2.18 | 1.33 | 0.00 | 0.01 | 0.00 |
| G222A/S223A | 1.24 | 1.05 | 1.87 | 0.51 | 0.60 | 0.90 | 0.01 | 0.01 | 0.01 |
| Y79A | 1.08 | 1.14 | 1.06 | 1.82 | 2.30 | 1.47 | 0.00 | 0.01 | 0.00 |
| D97A | 1.02 | 0.99 | 0.97 | 1.78 | 2.19 | 1.26 | 0.00 | 0.01 | 0.04 |
| S268A/S269A | 0.96 | 1.07 | 0.96 | 0.18 | 0.08 | 0.42 | 0.00 | 0.01 | 0.00 |
| Y50A/K51A | 1.05 | 1.10 | 1.10 | 1.91 | 2.27 | 1.42 | 0.01 | 0.01 | 0.00 |
| G56A/N57A | 0.84 | 0.85 | 0.89 | 1.89 | 2.29 | 1.29 | 0.00 | 0.01 | 0.00 |
| Y52A/L53A | 1.00 | 1.03 | 1.06 | 2.07 | 2.50 | 1.53 | 0.00 | 0.01 | 0.00 |
| Y90A/L91A | 1.01 | 1.08 | 1.08 | 1.94 | 2.16 | 1.38 | 0.01 | 0.01 | 0.00 |
| G58A/L59A | 1.03 | 1.16 | 1.01 | 1.85 | 2.09 | 1.34 | 0.01 | 0.01 | 0.00 |
| N262A/S263A | 0.93 | 0.93 | 0.88 | 0.14 | 0.06 | 0.40 | 0.00 | 0.01 | 0.07 |
| G62A/E63A | 0.97 | 0.98 | 1.03 | 1.53 | 1.79 | 1.04 | 0.01 | 0.01 | 0.06 |
| G86A/D87A | 1.02 | 1.10 | 0.94 | 1.82 | 2.18 | 1.26 | 0.01 | 0.01 | 0.00 |
| E74A/H75A | 0.96 | 0.97 | 0.97 | 1.80 | 2.10 | 1.32 | 0.01 | 0.01 | 0.01 |
| F100A/Q101A | 1.15 | 1.20 | 1.16 | 2.04 | 2.42 | 1.54 | 0.00 | 0.01 | 0.00 |
| G44A/L45A | 1.08 | 1.27 | 1.22 | 2.30 | 2.68 | 1.79 | 0.01 | 0.01 | 0.00 |
| P48A/G49A | 0.98 | 1.01 | 0.98 | 1.97 | 2.57 | 1.46 | 0.02 | 0.01 | 0.01 |
| V118A/F119A | 1.00 | 1.00 | 1.12 | 1.80 | 2.20 | 1.34 | 0.00 | 0.02 | 0.00 |
| K122A/K123A | 1.07 | 1.04 | 1.04 | 1.47 | 1.78 | 1.11 | 0.00 | 0.02 | 0.00 |
| N88A/P89A | 1.00 | 1.02 | 0.93 | 1.77 | 2.14 | 1.33 | 0.01 | 0.02 | 0.00 |
| N66A | 1.06 | 1.13 | 1.29 | 1.93 | 2.30 | 1.43 | 0.01 | 0.02 | 0.00 |
| Q82A/L83A | 1.07 | 1.16 | 1.10 | 1.84 | 2.13 | 1.39 | 0.02 | 0.04 | 0.09 |
| K258A/Q259A | 1.15 | 1.12 | 1.49 | 0.22 | 0.17 | 0.57 | 0.00 | 0.04 | 0.04 |
| D60A/K61A | 1.00 | 1.00 | 1.03 | 1.68 | 1.95 | 1.10 | 0.03 | 0.06 | 0.61 |
| I334A | 1.07 | 1.07 | 2.42 | 0.51 | 0.63 | 0.82 | 0.06 | 0.07 | 0.15 |
| L104A/K105A | 0.95 | 1.02 | 1.01 | 1.82 | 2.23 | 1.36 | 0.03 | 0.09 | 0.12 |
| W10A/L11A | 1.03 | 0.94 | 1.96 | 0.62 | 1.16 | 1.06 | 0.16 | 0.09 | 0.01 |

Table 5 shows AAV8 alanine mutations with slower blood clearance than the wild type. The listed mutations display retention in the blood at least 10 times higher than the wild-type AAV8 at 24 hours.

| Mutant | 1 m | 10 m | 30 m | 1 h | 4 h | 8 h | 24 h |
|---|---|---|---|---|---|---|---|
| AAV9 w/t | 0.93 | 0.94 | 1.07 | 1.48 | 2.20 | 3.70 | 5.28 |
| R585E | 0.91 | 0.94 | 1.23 | 1.52 | 3.22 | 8.22 | 16.97 |
| AAV8 w/t | 1.00 | 1.00 | 1.00 | 1.00 | 1.00 | 1.00 | 1.00 |
| T265A/S266A | 1.53 | 1.58 | 2.36 | 3.25 | 3.98 | 12.24 | 23.26 |
| Y708A/K709A | 0.92 | 1.31 | 1.55 | 1.51 | 3.76 | 6.35 | 16.72 |
| S387A/Q388A | 0.93 | 1.03 | 1.01 | 2.16 | 3.81 | 6.78 | 16.33 |
| N273A/T274A | 1.07 | 1.34 | 1.55 | 2.30 | 4.28 | 8.75 | 15.85 |
| N385A/G386A | 0.74 | 1.10 | 1.27 | 1.31 | 4.39 | 5.77 | 15.74 |
| T270A | 1.05 | 1.09 | 1.42 | 1.68 | 3.68 | 7.80 | 14.79 |
| W505A | 1.00 | 1.21 | 1.39 | 1.70 | 4.12 | 6.40 | 14.57 |
| T506A | 1.13 | 1.16 | 1.22 | 2.48 | 3.76 | 6.98 | 13.80 |
| L383A/N384A | 0.81 | 0.95 | 1.15 | 1.91 | 3.83 | 5.62 | 13.32 |
| N271A/D272A | 1.04 | 1.11 | 1.70 | 1.97 | 3.78 | 8.06 | 12.52 |
| P726A/R727A | 1.15 | 1.00 | 0.92 | 2.02 | 2.50 | 5.06 | 10.56 |
| T528A/H529A | 1.16 | 1.40 | 1.26 | 1.72 | 3.66 | 4.95 | 10.46 |
| G267A/G268A | 0.92 | 1.14 | 1.42 | 1.77 | 2.97 | 6.66 | 10.17 |

Table 6 shows AAV9 alanine mutations with slower blood clearance than the wild type. The listed mutations display retention in the blood at least 2 times higher than the wild-type AAV9 at 24 hours.

| Mutant | 1 m | 10 m | 30 m | 1 h | 4 h | 8 h | 24 h |
|---|---|---|---|---|---|---|---|
| AAV9 w/t | 1.00 | 1.00 | 1.00 | 1.00 | 1.00 | 1.00 | 1.00 |
| R585E | 0.92 | 0.93 | 1.11 | 1.24 | 1.41 | 1.94 | 4.51 |
| N262A/S263A | 1.09 | 1.00 | 1.16 | 1.37 | 1.85 | 2.16 | 5.16 |
| S268A/S269A | 1.04 | 1.04 | 1.16 | 1.31 | 1.63 | 2.13 | 5.03 |
| T264A/S265A | 1.03 | 1.19 | 1.14 | 1.34 | 1.67 | 2.14 | 5.03 |
| N272A | 1.12 | 1.07 | 1.14 | 1.35 | 1.84 | 2.03 | 4.49 |
| N270A/D271A | 0.94 | 1.06 | 1.13 | 1.18 | 1.48 | 1.99 | 4.36 |
| K258A/Q259A | 0.99 | 0.98 | 1.18 | 1.30 | 1.60 | 2.03 | 4.36 |
| G222A/S223A | 1.09 | 0.97 | 1.14 | 1.13 | 1.52 | 1.71 | 3.00 |
| N254A/H255A | 0.98 | 0.97 | 1.03 | 1.17 | 1.20 | 1.44 | 2.21 |
| I334A | 1.01 | 0.94 | 0.90 | 1.00 | 1.26 | 1.47 | 2.21 |

[0055] FIGS. 1A, 1B, 1C, 1D and 1E show liver-detargeting AAV9 mutants that transduce the heart at high levels. Single-stranded AAV-CMV-lacZ vectors packaged with 4 different capsids are indicated. Those capsids include AAV9W22A, AAV9W23A, AAV9W22A/W23A, and unmutated AAV9, and were injected into 8-week-old C57BL/6 male mice via the tail vein at a dose of 3×10¹¹ vg/mouse (n=3). The AAV-CMV-lacZ vector expresses the bacterial beta-galactosidase under the control of the human cytomegalovirus immediate early gene enhancer-promoter.

[0056] FIGS. 2A, 2B and 2C show liver-detargeting AAV9 mutants that transduce the brain at high levels. Double-stranded AAV-hSynl-GFP vectors packaged with 4 different capsids are indicated. Those capsids include AAV9N272A, AAV9-PHPB, AAV9N272A-PHPB, and unmutated AAV9 were injected into 8-week-old C57BL/6 male mice via the tail vein at a dose of 3×10¹¹ vg/mouse (n=2 to 3). The AAV-hSynl-lacZ vector expresses the enhanced green fluorescence protein (eGFP) under the control of the human synapsin I gene enhancer-promoter.

1. A recombinant adeno associated virus vector comprising a capsid protein of SEQ ID NO: 1 that has one or more of the mutations listed in Tables 1 and 5 herein.

2. The recombinant adeno associated virus vector of claim 1 comprising a capsid protein of SEQ ID NO: 1 that has one or more of the following single or double mutations: G28A, P30A/K31A, P32A/P33A, T265A/S266A, T270A, N271A/D272A, N273A/T274A, Y275A/F276A, G277A/Y278A, S387A/Q388A, W505A, T506A, T528A/H529A, and K530A/D531A, provided that the vector detargets the liver but transduces one or more of brain, heart, or skeletal muscle.

3. The recombinant viral vector of claim 1 comprising a capsid protein of SEQ ID NO: 1 that has one or more of the following single or double mutations: W10A/11A, G44A/L45A, V46A/L47A, P48A/G49A, Y50A/K51A, Y52A/L53A, G54A/P55A, F56A/N57A, G58A/L59A, D60A/K61A, D69A, E74A/H75A, D76A/K77A, Y79A, N88A/P89A, Y90A/L91A, R92A/Y93A, D97A, F100A/Q101A, V118A/F119A, K122A/K123A, K142A/K143A, R144A/P145A, R169A/K170A, R171A/L172A, N255A/H256A, K259A/Q260A, G267A/G268A, 1335A, L339A/T340A, L383A/N384A, N385A/G386A, G391A/R392A, D532A/E533A, S564A/E565A, E566A/E567A, T704A/S705A, N706A/Y707A, Y708A/K709A, 712A/V713A, V717A, P726A/R727A, provided that the vector detargets all of the brain, heart, lung, liver, kidney, spleen, intestine, pancreas, testis, muscle, or fat.

4. The recombinant viral vector of claim 3 further comprising an additional mutation that confers upon the vector an ability to transduce one or more tissues.

5. The recombinant viral vector of claim 1 comprising a capsid protein of SEQ ID NO: 1 that has one or both of the following double mutations: G86A/D87A or N94A/H95A provided that the vector transduces the liver but detargets all of the brain, heart, lung, liver, kidney, spleen, intestine, pancreas, testis, muscle or fat.

6. The recombinant viral vector of claim 1 comprising a capsid protein of SEQ ID NO: 1 that has one or more of the following double mutations: T265A/S266A, G267A/G268A, T270A, N271A/D272A, N273A/T274A, L383A/N384A, N385A/G386A, S387A/Q388A, W505A, T506A, T528A/H529A, Y708A/K709A, P726A/R727A, provided that the vector is retained at a concentration 10-fold higher in the blood following injection into an experimental animal than a viral vector comprising an unmutated capsid protein of SEQ ID NO: 1.

7. The recombinant viral vector of claim 1, comprising a capsid protein of SEQ ID NO: 3-63, or 107.

8. A recombinant viral vector comprising a capsid protein of SEQ ID NO: 2 that has one or more of the mutations listed in Tables 2, 3, and 4 herein.

9. The recombinant viral vector of claim 8 comprising a capsid protein of SEQ ID NO: 2 that has one or more of the following single or double mutations: W22A, W22A/W23A, K258A/Q259A, S268A/S269A, and N272A, provided that the vector detargets the liver but transduces one or more of brain, heart, or skeletal muscle.

10. The recombinant viral vector of claim 8 comprising a capsid protein of SEQ ID NO: 2 that has one or more of the following single or double mutations: W10A/11A, G44A/L45A, V46A/L47A, P48A/G49A, Y50A/K51A, Y52A/L53A, G54A/P55A, G56A/N57A, G58A/L59A, G62A/E63A, D69A, E74A/H75A, D76A/K77A, Y79A, Y90A/L91A, K92A/Y93A, D97A, F100A/Q101A, V118A/F119A, K122A/K123A, K142A/K143A, R144A/P145A, K168A/K169A, R170A/L171A, G222A/S223A, N254A/H255A, N262A/S263A, T264A/S265A, G266A/G267A, N270A/D271A, 1334A, and L338A/T339A provided that the vector detargets all of the brain, heart, lung, liver, kidney, spleen, intestine, pancreas, testis, muscle, or fat.

11. The recombinant viral vector of claim 10 where the capsid protein comprises an additional mutation that confers upon the vector an ability to transduce one or more tissues.

12. The recombinant viral vector of claim 8 comprising a capsid protein of SEQ ID NO: 2 that has one or both of the following double mutations: G86A/D87A or N94A/H95A provided that the vector transduces the liver but detargets all of the brain, heart, lung, liver, kidney, spleen, intestine, pancreas, testis, muscle or fat.

13. The recombinant viral vector of claim 8 comprising a capsid protein of SEQ ID NO:2 that has a N270A/D271A double mutation or an N272A mutation, provided that the vector binds CHO Pro5 cells but not to the surface of CHO Lec2 cells.

14. The recombinant viral vector of claim 8 comprising a capsid protein of SEQ ID NO: 2 that has one or more of the following double mutations: AAV9K258A/Q259A, AAV9N262A/S263A, AAV9T264A/S265A, AAV9G266A/G267A, and AAV9S268A/S269A provided that the vector is internalized in the cell but does not result in viral genome expression due to viral genome degradation.

15. The recombinant viral vector of claim 8 comprising a capsid protein of SEQ ID NO: 2 that has one or more of the following double mutations: AAV9W10A/L11A, AAV9G44A/L45A, AAV9V46A/L47A, AAV9P48A/G49A, AAV9Y50A/K51A, AAV9Y52A/L53A, AAV9G54A/P55A, AAV9G56A/N57A, AAV9G58A/L59A, AAV9D60A/K61A, AAV9G62A/E63A, AAV9N66A, AAV9D69A, AAV9E74A/H75A, AAV9D76A/K77A, AAV9Y79A, AAV9Q82A/L83A, AAV9G86A/D87A, AAV9N88A/P89A, AAV9Y90A/L91A, AAV9K92A/Y93A, AAV9N94A/H95A, AAV9D97A, AAV9F100A/Q101A, AAV9L104A/K105A, AAV9V118A/F119A, AAV9K122A/K123A, AAV9G222A/S223A, and AAV91334A, AAV9L338A/T339A, provided that the vector is internalized in the cell, is not degraded but does not result in viral genome expression.

16. The recombinant viral vector of claim 8 comprising a capsid protein of SEQ ID NO: 2 that has one or more of the following mutations: N262A/S263A, S268A/S269A, T264A/S265A, N272A, N270A/D271A, K258A/Q259A, G222A/S223A, N254A/H255A, 1334A provided that the vector is retained at a concentration 2-fold higher in the blood following injection into an experimental animal than a viral vector comprising an unmutated capsid protein of SEQ ID NO: 1.

17. The recombinant viral vector of claim 8 comprising a capsid protein of SEQ ID NO: 64-106 or 108-109.

The application's sequence listing, which the Patent Office published only in electronic form, follows.

SEQUENCE LISTING (108 sequences)

SEQ ID NO: 1 - protein, 738 aa, Adeno Associated Virus 8
MAADGYLPDWLEDNLSEGIREWWALKPGAPKPKANQQKQDDGRGLVLPGYKYLGPFNGLDKGEPVNAADAAALEHDKAYDQQLQAGDNPYLRYNHADAEFQERLQEDTSFGGNLGRAVFQAKKRVLEPLGLVEEGAKTAPGKKRPVEPSPQRSPDSSTGIGKKGQQPARKRLNFGQTGDSESVPDPQPLGEPPAAPSGVGPNTMAAGGGAPMADNNEGADGVGSSSGNWHCDSTWLGDRVITTSTRTWALPTYNNHLYKQISNGTSGGATNDNTYFGYSTPWGYFDFNRFHCHFSPRDWQRLINNNWGFRPKRLSFKLFNIQVKEVTQNEGTKTIANNLTSTIQVFTDSEYQLPYVLGSAHQGCLPPFPADVFMIPQYGYLTLNNGSQAVGRSSFYCLEYFPSQMLRTGNNFQFTYTFEDVPFHSSYAHSQSLDRLMNPLIDQYLYYLSRTQTTGGTANTQTLGFSQGGPNTMANQAKNWLPGPCYRQQRVSTTTGQNNNSNFAWTAGTKYHLNGRNSLANPGIAMATHKDDEERFFPSNGILIFGKQNAARDNADYSDVMLTSEEEIKTTNPVATEEYGIVADNLQQQNTAPQIGTVNSQGALPGMVWQNRDVYLQGPIWAKIPHTDGNFHPSPLMGGFGLKHPPPQILIKNTPVPADPPTTFNQSKLNSFITQYSTGQVSVEIEWELQKENSKRWNPEIQYTSNYYKSTSVDFAVNTEGVYSEPRPIGTRYLTRNL

SEQ ID NO: 2 - protein, 736 aa, Adeno Associated Virus 9
MAADGYLPDWLEDNLSEGIREWWALKPGAPQPKANQQHQDNARGLVLPGYKYLGPGNGLDKGEPVNAADAAALEHDKAYDQQLKAGDNPYLKYNHADAEFQERLKEDTSFGGNLGRAVFQAKKRLLEPLGLVEEAAKTAPGKKRPVEQSPQEPDSSAGIGKSGAQPAKKRLNFGQTGDTESVPDPQPIGEPPAAPSGVGSLTMASGGGAPVADNNEGADGVGSSSGNWHCDSQWLGDRVITTSTRTWALPTYNNHLYKQISNSTSGGSSNDNAYFGYSTPWGYFDFNRFHCHFSPRDWQRLINNNWGFRPKRLNFKLFNIQVKEVTDNNGVKTIANNLTSTVQVFTDSDYQLPYVLGSAHEGCLPPFPADVFMIPQYGYLTLNDGSQAVGRSSFYCLEYFPSQMLRTGNNFQFSYEFENVPFHSSYAHSQSLDRLMNPLIDQYLYYLSKTINGSGQNQQTLKFSVAGPSNMAVQGRNYIPGPSYRQQRVSTTVTQNNNSEFAWPGASSWALNGRNSLMNPGPAMASHKEGEDRFFPLSGSLIFGKQGTGRDNVDADKVMITNEEEIKTTNPVATESYGQVATNHQSAQAQAQTGWVQNQGILPGMVWQDRDVYLQGPIWAKIPHTDGNFHPSPLMGGFGMKHPPPQILIKNTPVPADPPTAFNKDKLNSFITQYSTGQVSVEIEWELQKENSKRWNPEIQYTSNYYKSNNVEFAVNTEGVYSEPRPIGTRYLTRNL

SEQ ID NO: 3 - protein, 720 aa, Adeno Associated Virus 8
MAADGYLPDAAEDNLSEGIREWWALKPGAPKPKANQQKQDDGRGLVLPGYKYLGPFNGLDKGEPVNAADAAALEHDKAYDQQLQAGDNPYLRYNHADAEFQERLQEDTSFGGNLGRAVFQAKKRVLEPLGLVEEGAKTAPGKKRPVEPSPQRSPDSSTGIGKKGQQPARKRLNFGQTGDSESVPDPQPLGEPPAAPSGVGPNTMAAGGGAPMADNNEGADGVGSSSGNWHCDSTWLGDRVITTSTRTWALPTYNNHLYKQISNGTSGGATNDNTYFGYSTPWGYFDFNRFHCHFSPRDWQRLINNNWGFRPKRLSFKLFNIQVKEVTQNEGTKTIANNLTSTIQVFTDSEYQLPYVLGSAHQGCLPPFPADVFMIPQYGYLTLNNGSQAVGRSSFYCLEYFPSQMLRTGNNFQFTYTFEDVPFHSSYAHSQSLDRLMNPLIDQYLYYLSRTQTTGGTANTQTLGFSQGGPNTMANQAKNWLPGPCYRQQRVSTTTGQNNNSNFAWTAGTKYHLNGRNSLANPGIAMATHKDDEERFFPSNGILIFGKQNAARDNADYSDVMLTSEEEIKTTNPVATEEYGIVADNLQQQNTAPQIGTVNSQGALPGMVWQNRDVYLQGPIWAKIPHTDGNFHPSPLMGGFGLKHPPPQILIKNTPVPADPPTTFNQSKLNSFITQYSTGQVSVEIEWELQKENSKRWNPEIQYTSNYYKSTSVDFAVNTE

SEQ ID NO: 4 - protein, 720 aa, Adeno Associated Virus 8
MAADGYLPDWLEDNLSEGIREWWALKPGAPKPKANQQKQDDGRGLVLAAYKYLGPFNGLDKGEPVNAADAAALEHDKAYDQQLQAGDNPYLRYNHADAEFQERLQEDTSFGGNLGRAVFQAKKRVLEPLGLVEEGAKTAPGKKRPVEPSPQRSPDSSTGIGKKGQQPARKRLNFGQTGDSESVPDPQPLGEPPAAPSGVGPNTMAAGGGAPMADNNEGADGVGSSSGNWHCDSTWLGDRVITTSTRTWALPTYNNHLYKQISNGTSGGATNDNTYFGYSTPWGYFDFNRFHCHFSPRDWQRLINNNWGFRPKRLSFKLFNIQVKEVTQNEGTKTIANNLTSTIQVFTDSEYQLPYVLGSAHQGCLPPFPADVFMIPQYGYLTLNNGSQAVGRSSFYCLEYFPSQMLRTGNNFQFTYTFEDVPFHSSYAHSQSLDRLMNPLIDQYLYYLSRTQTTGGTANTQTLGFSQGGPNTMANQAKNWLPGPCYRQQRVSTTTGQNNNSNFAWTAGTKYHLNGRNSLANPGIAMATHKDDEERFFPSNGILIFGKQNAARDNADYSDVMLTSEEEIKTTNPVATEEYGIVADNLQQQNTAPQIGTVNSQGALPGMVWQNRDVYLQGPIWAKIPHTDGNFHPSPLMGGFGLKHPPPQILIKNTPVPADPPTTFNQSKLNSFITQYSTGQVSVEIEWELQKENSKRWNPEIQYTSNYYKSTSVDFAVNTE

SEQ ID NO: 5 - protein, 720 aa, Adeno Associated Virus 8
MAADGYLPDWLEDNLSEGIREWWALKPGAPKPKANQQKQDDGRGLVLPGAAYLGPFNGLDKGEPVNAADAAALEHDKAYDQQLQAGDNPYLRYNHADAEFQERLQEDTSFGGNLGRAVFQAKKRVLEPLGLVEEGAKTAPGKKRPVEPSPQRSPDSSTGIGKKGQQPARKRLNFGQTGDSESVPDPQPLGEPPAAPSGVGPNTMAAGGGAPMADNNEGADGVGSSSGNWHCDSTWLGDRVITTSTRTWALPTYNNHLYKQISNGTSGGATNDNTYFGYSTPWGYFDFNRFHCHFSPRDWQRLINNNWGFRPKRLSFKLFNIQVKEVTQNEGTKTIANNLTSTIQVFTDSEYQLPYVLGSAHQGCLPPFPADVFMIPQYGYLTLNNGSQAVGRSSFYCLEYFPSQMLRTGNNFQFTYTFEDVPFHSSYAHSQSLDRLMNPLIDQYLYYLSRTQTTGGTANTQTLGFSQGGPNTMANQAKNWLPGPCYRQQRVSTTTGQNNNSNFAWTAGTKYHLNGRNSLANPGIAMATHKDDEERFFPSNGILIFGKQNAARDNADYSDVMLTSEEEIKTTNPVATEEYGIVADNLQQQNTAPQIGTVNSQGALPGMVWQNRDVYLQGPIWAKIPHTDGNFHPSPLMGGFGLKHPPPQILIKNTPVPADPPTTFNQSKLNSFITQYSTGQVSVEIEWELQKENSKRWNPEIQYTSNYYKSTSVDFAVNTE

SEQ ID NO: 6 - protein, 720 aa, Adeno Associated Virus 8
MAADGYLPDWLEDNLSEGIREWWALKPGAPKPKANQQKQDDGRGLVLPGYKYLAAFNGLDKGEPVNAADAAALEHDKAYDQQLQAGDNPYLRYNHADAEFQERLQEDTSFGGNLGRAVFQAKKRVLEPLGLVEEGAKTAPGKKRPVEPSPQRSPDSSTGIGKKGQQPARKRLNFGQTGDSESVPDPQPLGEPPAAPSGVGPNTMAAGGGAPMADNNEGADGVGSSSGNWHCDSTWLGDRVITTSTRTWALPTYNNHLYKQISNGTSGGATNDNTYFGYSTPWGYFDFNRFHCHFSPRDWQRLINNNWGFRPKRLSFKLFNIQVKEVTQNEGTKTIANNLTSTIQVFTDSEYQLPYVLGSAHQGCLPPFPADVFMIPQYGYLTLNNGSQAVGRSSFYCLEYFPSQMLRTGNNFQFTYTFEDVPFHSSYAHSQSLDRLMNPLIDQYLYYLSRTQTTGGTANTQTLGFSQGGPNTMANQAKNWLPGPCYRQQRVSTTTGQNNNSNFAWTAGTKYHLNGRNSLANPGIAMATHKDDEERFFPSNGILIFGKQNAARDNADYSDVMLTSEEEIKTTNPVATEEYGIVADNLQQQNTAPQIGTVNSQGALPGMVWQNRDVYLQGPIWAKIPHTDGNFHPSPLMGGFGLKHPPPQILIKNTPVPADPPTTFNQSKLNSFITQYSTGQVSVEIEWELQKENSKRWNPEIQYTSNYYKSTSVDFAVNTE

SEQ ID NO: 7 - protein, 720 aa, Adeno Associated Virus 8
MAADGYLPDWLEDNLSEGIREWWALKPGAPKPKANQQKQDDGRGLVLPGYKYLGPAAGLDKGEPVNAADAAALEHDKAYDQQLQAGDNPYLRYNHADAEFQERLQEDTSFGGNLGRAVFQAKKRVLEPLGLVEEGAKTAPGKKRPVEPSPQRSPDSSTGIGKKGQQPARKRLNFGQTGDSESVPDPQPLGEPPAAPSGVGPNTMAAGGGAPMADNNEGADGVGSSSGNWHCDSTWLGDRVITTSTRTWALPTYNNHLYKQISNGTSGGATNDNTYFGYSTPWGYFDFNRFHCHFSPRDWQRLINNNWGFRPKRLSFKLFNIQVKEVTQNEGTKTIANNLTSTIQVFTDSEYQLPYVLGSAHQGCLPPFPADVFMIPQYGYLTLNNGSQAVGRSSFYCLEYFPSQMLRTGNNFQFTYTFEDVPFHSSYAHSQSLDRLMNPLIDQYLYYLSRTQTTGGTANTQTLGFSQGGPNTMANQAKNWLPGPCYRQQRVSTTTGQNNNSNFAWTAGTKYHLNGRNSLANPGIAMATHKDDEERFFPSNGILIFGKQNAARDNADYSDVMLTSEEEIKTTNPVATEEYGIVADNLQQQNTAPQIGTVNSQGALPGMVWQNRDVYLQGPIWAKIPHTDGNFHPSPLMGGFGLKHPPPQILIKNTPVPADPPTTFNQSKLNSFITQYSTGQVSVEIEWELQKENSKRWNPEIQYTSNYYKSTSVDFAVNTE

SEQ ID NO: 8 - protein, 720 aa, Adeno Associated Virus 8
MAADGYLPDWLEDNLSEGIREWWALKPGAPKPKANQQKQDDGRGLVLPGYKYLGPFNAADKGEPVNAADAAALEHDKAYDQQLQAGDNPYLRYNHADAEFQERLQEDTSFGGNLGRAVFQAKKRVLEPLGLVEEGAKTAPGKKRPVEPSPQRSPDSSTGIGKKGQQPARKRLNFGQTGDSESVPDPQPLGEPPAAPSGVGPNTMAAGGGAPMADNNEGADGVGSSSGNWHCDSTWLGDRVITTSTRTWALPTYNNHLYKQISNGTSGGATNDNTYFGYSTPWGYFDFNRFHCHFSPRDWQRLINNNWGFRPKRLSFKLFNIQVKEVTQNEGTKTIANNLTSTIQVFTDSEYQLPYVLGSAHQGCLPPFPADVFMIPQYGYLTLNNGSQAVGRSSFYCLEYFPSQMLRTGNNFQFTYTFEDVPFHSSYAHSQSLDRLMNPLIDQYLYYLSRTQTTGGTANTQTLGFSQGGPNTMANQAKNWLPGPCYRQQRVSTTTGQNNNSNFAWTAGTKYHLNGRNSLANPGIAMATHKDDEERFFPSNGILIFGKQNAARDNADYSDVMLTSEEEIKTTNPVATEEYGIVADNLQQQNTAPQIGTVNSQGALPGMVWQNRDVYLQGPIWAKIPHTDGNFHPSPLMGGFGLKHPPPQILIKNTPVPADPPTTFNQSKLNSFITQYSTGQVSVEIEWELQKENSKRWNPEIQYTSNYYKSTSVDFAVNTE

SEQ ID NO: 9 - protein, 720 aa, Adeno Associated Virus 8
MAADGYLPDWLEDNLSEGIREWWALKPGAPKPKANQQKQDDGRGLVLPGYKYLGPFNGLDKGEPVNAAAAAALEHDKAYDQQLQAGDNPYLRYNHADAEFQERLQEDTSFGGNLGRAVFQAKKRVLEPLGLVEEGAKTAPGKKRPVEPSPQRSPDSSTGIGKKGQQPARKRLNFGQTGDSESVPDPQPLGEPPAAPSGVGPNTMAAGGGAPMADNNEGADGVGSSSGNWHCDSTWLGDRVITTSTRTWALPTYNNHLYKQISNGTSGGATNDNTYFGYSTPWGYFDFNRFHCHFSPRDWQRLINNNWGFRPKRLSFKLFNIQVKEVTQNEGTKTIANNLTSTIQVFTDSEYQLPYVLGSAHQGCLPPFPADVFMIPQYGYLTLNNGSQAVGRSSFYCLEYFPSQMLRTGNNFQFTYTFEDVPFHSSYAHSQSLDRLMNPLIDQYLYYLSRTQTTGGTANTQTLGFSQGGPNTMANQAKNWLPGPCYRQQRVSTTTGQNNNSNFAWTAGTKYHLNGRNSLANPGIAMATHKDDEERFFPSNGILIFGKQNAARDNADYSDVMLTSEEEIKTTNPVATEEYGIVADNLQQQNTAPQIGTVNSQGALPGMVWQNRDVYLQGPIWAKIPHTDGNFHPSPLMGGFGLKHPPPQILIKNTPVPADPPTTFNQSKLNSFITQYSTGQVSVEIEWELQKENSKRWNPEIQYTSNYYKSTSVDFAVNTE

SEQ ID NO: 10 - protein, 720 aa, Adeno Associated Virus 8
MAADGYLPDWLEDNLSEGIREWWALKPGAPKPKANQQKQDDGRGLVLPGYKYLGPFNGLDKGEPVNAADAAALAADKAYDQQLQAGDNPYLRYNHADAEFQERLQEDTSFGGNLGRAVFQAKKRVLEPLGLVEEGAKTAPGKKRPVEPSPQRSPDSSTGIGKKGQQPARKRLNFGQTGDSESVPDPQPLGEPPAAPSGVGPNTMAAGGGAPMADNNEGADGVGSSSGNWHCDSTWLGDRVITTSTRTWALPTYNNHLYKQISNGTSGGATNDNTYFGYSTPWGYFDFNRFHCHFSPRDWQRLINNNWGFRPKRLSFKLFNIQVKEVTQNEGTKTIANNLTSTIQVFTDSEYQLPYVLGSAHQGCLPPFPADVFMIPQYGYLTLNNGSQAVGRSSFYCLEYFPSQMLRTGNNFQFTYTFEDVPFHSSYAHSQSLDRLMNPLIDQYLYYLSRTQTTGGTANTQTLGFSQGGPNTMANQAKNWLPGPCYRQQRVSTTTGQNNNSNFAWTAGTKYHLNGRNSLANPGIAMATHKDDEERFFPSNGILIFGKQNAARDNADYSDVMLTSEEEIKTTNPVATEEYGIVADNLQQQNTAPQIGTVNSQGALPGMVWQNRDVYLQGPIWAKIPHTDGNFHPSPLMGGFGLKHPPPQILIKNTPVPADPPTTFNQSKLNSFITQYSTGQVSVEIEWELQKENSKRWNPEIQYTSNYYKSTSVDFAVNTE

SEQ ID NO: 11 - protein, 720 aa, Adeno Associated Virus 8
MAADGYLPDWLEDNLSEGIREWWALKPGAPKPKANQQKQDDGRGLVLPGYKYLGPFNGLDKGEPVNAADAAALEHAAAYDQQLQAGDNPYLRYNHADAEFQERLQEDTSFGGNLGRAVFQAKKRVLEPLGLVEEGAKTAPGKKRPVEPSPQRSPDSSTGIGKKGQQPARKRLNFGQTGDSESVPDPQPLGEPPAAPSGVGPNTMAAGGGAPMADNNEGADGVGSSSGNWHCDSTWLGDRVITTSTRTWALPTYNNHLYKQISNGTSGGATNDNTYFGYSTPWGYFDFNRFHCHFSPRDWQRLINNNWGFRPKRLSFKLFNIQVKEVTQNEGTKTIANNLTSTIQVFTDSEYQLPYVLGSAHQGCLPPFPADVFMIPQYGYLTLNNGSQAVGRSSFYCLEYFPSQMLRTGNNFQFTYTFEDVPFHSSYAHSQSLDRLMNPLIDQYLYYLSRTQTTGGTANTQTLGFSQGGPNTMANQAKNWLPGPCYRQQRVSTTTGQNNNSNFAWTAGTKYHLNGRNSLANPGIAMATHKDDEERFFPSNGILIFGKQNAARDNADYSDVMLTSEEEIKTTNPVATEEYGIVADNLQQQNTAPQIGTVNSQGALPGMVWQNRDVYLQGPIWAKIPHTDGNFHPSPLMGGFGLKHPPPQILIKNTPVPADPPTTFNQSKLNSFITQYSTGQVSVEIEWELQKENSKRWNPEIQYTSNYYKSTSVDFAVNTE

SEQ ID NO: 12 - protein, 720 aa, Adeno Associated Virus 8
MAADGYLPDWLEDNLSEGIREWWALKPGAPKPKANQQKQDDGRGLVLPGYKYLGPFNGLDKGEPVNAADAAALEHDKAADQQLQAGDNPYLRYNHADAEFQERLQEDTSFGGNLGRAVFQAKKRVLEPLGLVEEGAKTAPGKKRPVEPSPQRSPDSSTGIGKKGQQPARKRLNFGQTGDSESVPDPQPLGEPPAAPSGVGPNTMAAGGGAPMADNNEGADGVGSSSGNWHCDSTWLGDRVITTSTRTWALPTYNNHLYKQISNGTSGGATNDNTYFGYSTPWGYFDFNRFHCHFSPRDWQRLINNNWGFRPKRLSFKLFNIQVKEVTQNEGTKTIANNLTSTIQVFTDSEYQLPYVLGSAHQGCLPPFPADVFMIPQYGYLTLNNGSQAVGRSSFYCLEYFPSQMLRTGNNFQFTYTFEDVPFHSSYAHSQSLDRLMNPLIDQYLYYLSRTQTTGGTANTQTLGFSQGGPNTMANQAKNWLPGPCYRQQRVSTTTGQNNNSNFAWTAGTKYHLNGRNSLANPGIAMATHKDDEERFFPSNGILIFGKQNAARDNADYSDVMLTSEEEIKTTNPVATEEYGIVADNLQQQNTAPQIGTVNSQGALPGMVWQNRDVYLQGPIWAKIPHTDGNFHPSPLMGGFGLKHPPPQILIKNTPVPADPPTTFNQSKLNSFITQYSTGQVSVEIEWELQKENSKRWNPEIQYTSNYYKSTSVDFAVNTE

SEQ ID NO: 13 - protein, 720 aa, Adeno Associated Virus 8
MAADGYLPDWLEDNLSEGIREWWALKPGAPKPKANQQKQDDGRGLVLPGYKYLGPFNGLDKGEPVNAADAAALEHDKAYDQQLQAGDNPAARYNHADAEFQERLQEDTSFGGNLGRAVFQAKKRVLEPLGLVEEGAKTAPGKKRPVEPSPQRSPDSSTGIGKKGQQPARKRLNFGQTGDSESVPDPQPLGEPPAAPSGVGPNTMAAGGGAPMADNNEGADGVGSSSGNWHCDSTWLGDRVITTSTRTWALPTYNNHLYKQISNGTSGGATNDNTYFGYSTPWGYFDFNRFHCHFSPRDWQRLINNNWGFRPKRLSFKLFNIQVKEVTQNEGTKTIANNLTSTIQVFTDSEYQLPYVLGSAHQGCLPPFPADVFMIPQYGYLTLNNGSQAVGRSSFYCLEYFPSQMLRTGNNFQFTYTFEDVPFHSSYAHSQSLDRLMNPLIDQYLYYLSRTQTTGGTANTQTLGFSQGGPNTMANQAKNWLPGPCYRQQRVSTTTGQNNNSNFAWTAGTKYHLNGRNSLANPGIAMATHKDDEERFFPSNGILIFGKQNAARDNADYSDVMLTSEEEIKTTNPVATEEYGIVADNLQQQNTAPQIGTVNSQGALPGMVWQNRDVYLQGPIWAKIPHTDGNFHPSPLMGGFGLKHPPPQILIKNTPVPADPPTTFNQSKLNSFITQYSTGQVSVEIEWELQKENSKRWNPEIQYTSNYYKSTSVDFAVNTE

SEQ ID NO: 14 - protein, 720 aa, Adeno Associated Virus 8
MAADGYLPDWLEDNLSEGIREWWALKPGAPKPKANQQKQDDGRGLVLPGYKYLGPFNGLDKGEPVNAADAAALEHDKAYDQQLQAGDNPYLRYNHAAAEFQERLQEDTSFGGNLGRAVFQAKKRVLEPLGLVEEGAKTAPGKKRPVEPSPQRSPDSSTGIGKKGQQPARKRLNFGQTGDSESVPDPQPLGEPPAAPSGVGPNTMAAGGGAPMADNNEGADGVGSSSGNWHCDSTWLGDRVITTSTRTWALPTYNNHLYKQISNGTSGGATNDNTYFGYSTPWGYFDFNRFHCHFSPRDWQRLINNNWGFRPKRLSFKLFNIQVKEVTQNEGTKTIANNLTSTIQVFTDSEYQLPYVLGSAHQGCLPPFPADVFMIPQYGYLTLNNGSQAVGRSSFYCLEYFPSQMLRTGNNFQFTYTFEDVPFHSSYAHSQSLDRLMNPLIDQYLYYLSRTQTTGGTANTQTLGFSQGGPNTMANQAKNWLPGPCYRQQRVSTTTGQNNNSNFAWTAGTKYHLNGRNSLANPGIAMATHKDDEERFFPSNGILIFGKQNAARDNADYSDVMLTSEEEIKTTNPVATEEYGIVADNLQQQNTAPQIGTVNSQGALPGMVWQNRDVYLQGPIWAKIPHTDGNFHPSPLMGGFGLKHPPPQILIKNTPVPADPPTTFNQSKLNSFITQYSTGQVSVEIEWELQKENSKRWNPEIQYTSNYYKSTSVDFAVNTE

SEQ ID NO: 15 - protein, 720 aa, Adeno Associated Virus 8
MAADGYLPDWLEDNLSEGIREWWALKPGAPKPKANQQKQDDGRGLVLPGYKYLGPFNGLDKGEPVNAADAAALEHDKAYDQQLQAGDNPYLRYNHADAEAAERLQEDTSFGGNLGRAVFQAKKRVLEPLGLVEEGAKTAPGKKRPVEPSPQRSPDSSTGIGKKGQQPARKRLNFGQTGDSESVPDPQPLGEPPAAPSGVGPNTMAAGGGAPMADNNEGADGVGSSSGNWHCDSTWLGDRVITTSTRTWALPTYNNHLYKQISNGTSGGATNDNTYFGYSTPWGYFDFNRFHCHFSPRDWQRLINNNWGFRPKRLSFKLFNIQVKEVTQNEGTKTIANNLTSTIQVFTDSEYQLPYVLGSAHQGCLPPFPADVFMIPQYGYLTLNNGSQAVGRSSFYCLEYFPSQMLRTGNNFQFTYTFEDVPFHSSYAHSQSLDRLMNPLIDQYLYYLSRTQTTGGTANTQTLGFSQGGPNTMANQAKNWLPGPCYRQQRVSTTTGQNNNSNFAWTAGTKYHLNGRNSLANPGIAMATHKDDEERFFPSNGILIFGKQNAARDNADYSDVMLTSEEEIKTTNPVATEEYGIVADNLQQQNTAPQIGTVNSQGALPGMVWQNRDVYLQGPIWAKIPHTDGNFHPSPLMGGFGLKHPPPQILIKNTPVPADPPTTFNQSKLNSFITQYSTGQVSVEIEWELQKENSKRWNPEIQYTSNYYKSTSVDFAVNTE

SEQ ID NO: 16 - protein, 720 aa, Adeno Associated Virus 8
MAADGYLPDWLEDNLSEGIREWWALKPGAPKPKANQQKQDDGRGLVLPGYKYLGPFNGLDKGEPVNAADAAALEHDKAYDQQLQAGDNPYLRYNHADAEFQERLQEDTSFGGNLGRAAAQAKKRVLEPLGLVEEGAKTAPGKKRPVEPSPQRSPDSSTGIGKKGQQPARKRLNFGQTGDSESVPDPQPLGEPPAAPSGVGPNTMAAGGGAPMADNNEGADGVGSSSGNWHCDSTWLGDRVITTSTRTWALPTYNNHLYKQISNGTSGGATNDNTYFGYSTPWGYFDFNRFHCHFSPRDWQRLINNNWGFRPKRLSFKLFNIQVKEVTQNEGTKTIANNLTSTIQVFTDSEYQLPYVLGSAHQGCLPPFPADVFMIPQYGYLTLNNGSQAVGRSSFYCLEYFPSQMLRTGNNFQFTYTFEDVPFHSSYAHSQSLDRLMNPLIDQYLYYLSRTQTTGGTANTQTLGFSQGGPNTMANQAKNWLPGPCYRQQRVSTTTGQNNNSNFAWTAGTKYHLNGRNSLANPGIAMATHKDDEERFFPSNGILIFGKQNAARDNADYSDVMLTSEEEIKTTNPVATEEYGIVADNLQQQNTAPQIGTVNSQGALPGMVWQNRDVYLQGPIWAKIPHTDGNFHPSPLMGGFGLKHPPPQILIKNTPVPADPPTTFNQSKLNSFITQYSTGQVSVEIEWELQKENSKRWNPEIQYTSNYYKSTSVDFAVNTE

SEQ ID NO: 17 - protein, 720 aa, Adeno Associated Virus 8
MAADGYLPDWLEDNLSEGIREWWALKPGAPKPKANQQKQDDGRGLVLPGYKYLGPFNGLDKGEPVNAADAAALEHDKAYDQQLQAGDNPYLRYNHADAEFQERLQEDTSFGGNLGRAVFQAAARVLEPLGLVEEGAKTAPGKKRPVEPSPQRSPDSSTGIGKKGQQPARKRLNFGQTGDSESVPDPQPLGEPPAAPSGVGPNTMAAGGGAPMADNNEGADGVGSSSGNWHCDSTWLGDRVITTSTRTWALPTYNNHLYKQISNGTSGGATNDNTYFGYSTPWGYFDFNRFHCHFSPRDWQRLINNNWGFRPKRLSFKLFNIQVKEVTQNEGTKTIANNLTSTIQVFTDSEYQLPYVLGSAHQGCLPPFPADVFMIPQYGYLTLNNGSQAVGRSSFYCLEYFPSQMLRTGNNFQFTYTFEDVPFHSSYAHSQSLDRLMNPLIDQYLYYLSRTQTTGGTANTQTLGFSQGGPNTMANQAKNWLPGPCYRQQRVSTTTGQNNNSNFAWTAGTKYHLNGRNSLANPGIAMATHKDDEERFFPSNGILIFGKQNAARDNADYSDVMLTSEEEIKTTNPVATEEYGIVADNLQQQNTAPQIGTVNSQGALPGMVWQNRDVYLQGPIWAKIPHTDGNFHPSPLMGGFGLKHPPPQILIKNTPVPADPPTTFNQSKLNSFITQYSTGQVSVEIEWELQKENSKRWNPEIQYTSNYYKSTSVDFAVNTE

SEQ ID NO: 18 - protein, 720 aa, Adeno Associated Virus 8
MAADGYLPDWLEDNLSEGIREWWALKPGAPKPKANQQKQDDGRGLVLPGYKYLGPFNGLDKGEPVNAADAAALEHDKAYDQQLQAGDNPYLRYNHADAEFQERLQEDTSFGGNLGRAVFQAKKRVLEPLGLVEEGAKTAPGAARPVEPSPQRSPDSSTGIGKKGQQPARKRLNFGQTGDSESVPDPQPLGEPPAAPSGVGPNTMAAGGGAPMADNNEGADGVGSSSGNWHCDSTWLGDRVITTSTRTWALPTYNNHLYKQISNGTSGGATNDNTYFGYSTPWGYFDFNRFHCHFSPRDWQRLINNNWGFRPKRLSFKLFNIQVKEVTQNEGTKTIANNLTSTIQVFTDSEYQLPYVLGSAHQGCLPPFPADVFMIPQYGYLTLNNGSQAVGRSSFYCLEYFPSQMLRTGNNFQFTYTFEDVPFHSSYAHSQSLDRLMNPLIDQYLYYLSRTQTTGGTANTQTLGFSQGGPNTMANQAKNWLPGPCYRQQRVSTTTGQNNNSNFAWTAGTKYHLNGRNSLANPGIAMATHKDDEERFFPSNGILIFGKQNAARDNADYSDVMLTSEEEIKTTNPVATEEYGIVADNLQQQNTAPQIGTVNSQGALPGMVWQNRDVYLQGPIWAKIPHTDGNFHPSPLMGGFGLKHPPPQILIKNTPVPADPPTTFNQSKLNSFITQYSTGQVSVEIEWELQKENSKRWNPEIQYTSNYYKSTSVDFAVNTE

SEQ ID NO: 19 - protein, 720 aa, Adeno Associated Virus 8
MAADGYLPDWLEDNLSEGIREWWALKPGAPKPKANQQKQDDGRGLVLPGYKYLGPFNGLDKGEPVNAADAAALEHDKAYDQQLQAGDNPYLRYNHADAEFQERLQEDTSFGGNLGRAVFQAKKRVLEPLGLVEEGAKTAPGKKAAVEPSPQRSPDSSTGIGKKGQQPARKRLNFGQTGDSESVPDPQPLGEPPAAPSGVGPNTMAAGGGAPMADNNEGADGVGSSSGNWHCDSTWLGDRVITTSTRTWALPTYNNHLYKQISNGTSGGATNDNTYFGYSTPWGYFDFNRFHCHFSPRDWQRLINNNWGFRPKRLSFKLFNIQVKEVTQNEGTKTIANNLTSTIQVFTDSEYQLPYVLGSAHQGCLPPFPADVFMIPQYGYLTLNNGSQAVGRSSFYCLEYFPSQMLRTGNNFQFTYTFEDVPFHSSYAHSQSLDRLMNPLIDQYLYYLSRTQTTGGTANTQTLGFSQGGPNTMANQAKNWLPGPCYRQQRVSTTTGQNNNSNFAWTAGTKYHLNGRNSLANPGIAMATHKDDEERFFPSNGILIFGKQNAARDNADYSDVMLTSEEEIKTTNPVATEEYGIVADNLQQQNTAPQIGTVNSQGALPGMVWQNRDVYLQGPIWAKIPHTDGNFHPSPLMGGFGLKHPPPQILIKNTPVPADPPTTFNQSKLNSFITQYSTGQVSVEIEWELQKENSKRWNPEIQYTSNYYKSTSVDFAVNTE

SEQ ID NO: 20 - protein, 720 aa, Adeno Associated Virus 8
MAADGYLPDWLEDNLSEGIREWWALKPGAPKPKANQQKQDDGRGLVLPGYKYLGPFNGLDKGEPVNAADAAALEHDKAYDQQLQAGDNPYLRYNHADAEFQERLQEDTSFGGNLGRAVFQAKKRVLEPLGLVEEGAKTAPGKKRPVEPSPQRSPDSSTGIGKKGQQPAAARLNFGQTGDSESVPDPQPLGEPPAAPSGVGPNTMAAGGGAPMADNNEGADGVGSSSGNWHCDSTWLGDRVITTSTRTWALPTYNNHLYKQISNGTSGGATNDNTYFGYSTPWGYFDFNRFHCHFSPRDWQRLINNNWGFRPKRLSFKLFNIQVKEVTQNEGTKTIANNLTSTIQVFTDSEYQLPYVLGSAHQGCLPPFPADVFMIPQYGYLTLNNGSQAVGRSSFYCLEYFPSQMLRTGNNFQFTYTFEDVPFHSSYAHSQSLDRLMNPLIDQYLYYLSRTQTTGGTANTQTLGFSQGGPNTMANQAKNWLPGPCYRQQRVSTTTGQNNNSNFAWTAGTKYHLNGRNSLANPGIAMATHKDDEERFFPSNGILIFGKQNAARDNADYSDVMLTSEEEIKTTNPVATEEYGIVADNLQQQNTAPQIGTVNSQGALPGMVWQNRDVYLQGPIWAKIPHTDGNFHPSPLMGGFGLKHPPPQILIKNTPVPADPPTTFNQSKLNSFITQYSTGQVSVEIEWELQKENSKRWNPEIQYTSNYYKSTSVDFAVNTE

SEQ ID NO: 21 - protein, 720 aa, Adeno Associated Virus 8
MAADGYLPDWLEDNLSEGIREWWALKPGAPKPKANQQKQDDGRGLVLPGYKYLGPFNGLDKGEPVNAADAAALEHDKAYDQQLQAGDNPYLRYNHADAEFQERLQEDTSFGGNLGRAVFQAKKRVLEPLGLVEEGAKTAPGKKRPVEPSPQRSPDSSTGIGKKGQQPARKAANFGQTGDSESVPDPQPLGEPPAAPSGVGPNTMAAGGGAPMADNNEGADGVGSSSGNWHCDSTWLGDRVITTSTRTWALPTYNNHLYKQISNGTSGGATNDNTYFGYSTPWGYFDFNRFHCHFSPRDWQRLINNNWGFRPKRLSFKLFNIQVKEVTQNEGTKTIANNLTSTIQVFTDSEYQLPYVLGSAHQGCLPPFPADVFMIPQYGYLTLNNGSQAVGRSSFYCLEYFPSQMLRTGNNFQFTYTFEDVPFHSSYAHSQSLDRLMNPLIDQYLYYLSRTQTTGGTANTQTLGFSQGGPNTMANQAKNWLPGPCYRQQRVSTTTGQNNNSNFAWTAGTKYHLNGRNSLANPGIAMATHKDDEERFFPSNGILIFGKQNAARDNADYSDVMLTSEEEIKTTNPVATEEYGIVADNLQQQNTAPQIGTVNSQGALPGMVWQNRDVYLQGPIWAKIPHTDGNFHPSPLMGGFGLKHPPPQILIKNTPVPADPPTTFNQSKLNSFITQYSTGQVSVEIEWELQKENSKRWNPEIQYTSNYYKSTSVDFAVNTE

SEQ ID NO: 22 - protein, 720 aa, Adeno Associated Virus 8
MAADGYLPDWLEDNLSEGIREWWALKPGAPKPKANQQKQDDGRGLVLPGYKYLGPFNGLDKGEPVNAADAAALEHDKAYDQQLQAGDNPYLRYNHADAEFQERLQEDTSFGGNLGRAVFQAKKRVLEPLGLVEEGAKTAPGKKRPVEPSPQRSPDSSTGIGKKGQQPARKRLNFGQTGDSESVPDPQPLGEPPAAPSGVGPNTMAAGGGAPMADNNEGADGVGSSSGNWHCDSTWLGDRVITTSTRTWALPTYNNHLYKQISNGAAGGATNDNTYFGYSTPWGYFDFNRFHCHFSPRDWQRLINNNWGFRPKRLSFKLFNIQVKEVTQNEGTKTIANNLTSTIQVFTDSEYQLPYVLGSAHQGCLPPFPADVFMIPQYGYLTLNNGSQAVGRSSFYCLEYFPSQMLRTGNNFQFTYTFEDVPFHSSYAHSQSLDRLMNPLIDQYLYYLSRTQTTGGTANTQTLGFSQGGPNTMANQAKNWLPGPCYRQQRVSTTTGQNNNSNFAWTAGTKYHLNGRNSLANPGIAMATHKDDEERFFPSNGILIFGKQNAARDNADYSDVMLTSEEEIKTTNPVATEEYGIVADNLQQQNTAPQIGTVNSQGALPGMVWQNRDVYLQGPIWAKIPHTDGNFHPSPLMGGFGLKHPPPQILIKNTPVPADPPTTFNQSKLNSFITQYSTGQVSVEIEWELQKENSKRWNPEIQYTSNYYKSTSVDFAVNTE

SEQ ID NO: 23 - protein, 720 aa, Adeno Associated Virus 8
MAADGYLPDWLEDNLSEGIREWWALKPGAPKPKANQQKQDDGRGLVLPGYKYLGPFNGLDKGEPVNAADAAALEHDKAYDQQLQAGDNPYLRYNHADAEFQERLQEDTSFGGNLGRAVFQAKKRVLEPLGLVEEGAKTAPGKKRPVEPSPQRSPDSSTGIGKKGQQPARKRLNFGQTGDSESVPDPQPLGEPPAAPSGVGPNTMAAGGGAPMADNNEGADGVGSSSGNWHCDSTWLGDRVITTSTRTWALPTYNNHLYKQISNGTSAAATNDNTYFGYSTPWGYFDFNRFHCHFSPRDWQRLINNNWGFRPKRLSFKLFNIQVKEVTQNEGTKTIANNLTSTIQVFTDSEYQLPYVLGSAHQGCLPPFPADVFMIPQYGYLTLNNGSQAVGRSSFYCLEYFPSQMLRTGNNFQFTYTFEDVPFHSSYAHSQSLDRLMNPLIDQYLYYLSRTQTTGGTANTQTLGFSQGGPNTMANQAKNWLPGPCYRQQRVSTTTGQNNNSNFAWTAGTKYHLNGRNSLANPGIAMATHKDDEERFFPSNGILIFGKQNAARDNADYSDVMLTSEEEIKTTNPVATEEYGIVADNLQQQNTAPQIGTVNSQGALPGMVWQNRDVYLQGPIWAKIPHTDGNFHPSPLMGGFGLKHPPPQILIKNTPVPADPPTTFNQSKLNSFITQYSTGQVSVEIEWELQKENSKRWNPEIQYTSNYYKSTSVDFAVNTE

SEQ ID NO: 24 - protein, 720 aa, Adeno Associated Virus 8
MAADGYLPDWLEDNLSEGIREWWALKPGAPKPKANQQKQDDGRGLVLPGYKYLGPFNGLDKGEPVNAADAAALEHDKAYDQQLQAGDNPYLRYNHADAEFQERLQEDTSFGGNLGRAVFQAKKRVLEPLGLVEEGAKTAPGKKRPVEPSPQRSPDSSTGIGKKGQQPARKRLNFGQTGDSESVPDPQPLGEPPAAPSGVGPNTMAAGGGAPMADNNEGADGVGSSSGNWHCDSTWLGDRVITTSTRTWALPTYNNHLYKQISNGTSGGATNDAAYFGYSTPWGYFDFNRFHCHFSPRDWQRLINNNWGFRPKRLSFKLFNIQVKEVTQNEGTKTIANNLTSTIQVFTDSEYQLPYVLGSAHQGCLPPFPADVFMIPQYGYLTLNNGSQAVGRSSFYCLEYFPSQMLRTGNNFQFTYTFEDVPFHSSYAHSQSLDRLMNPLIDQYLYYLSRTQTTGGTANTQTLGFSQGGPNTMANQAKNWLPGPCYRQQRVSTTTGQNNNSNFAWTAGTKYHLNGRNSLANPGIAMATHKDDEERFFPSNGILIFGKQNAARDNADYSDVMLTSEEEIKTTNPVATEEYGIVADNLQQQNTAPQIGTVNSQGALPGMVWQNRDVYLQGPIWAKIPHTDGNFHPSPLMGGFGLKHPPPQILIKNTPVPADPPTTFNQSKLNSFITQYSTGQVSVEIEWELQKENSKRWNPEIQYTSNYYKSTSVDFAVNTE

SEQ ID NO: 25 - protein, 720 aa, Adeno Associated Virus 8
MAADGYLPDWLEDNLSEGIREWWALKPGAPKPKANQQKQDDGRGLVLPGYKYLGPFNGLDKGEPVNAADAAALEHDKAYDQQLQAGDNPYLRYNHADAEFQERLQEDTSFGGNLGRAVFQAKKRVLEPLGLVEEGAKTAPGKKRPVEPSPQRSPDSSTGIGKKGQQPARKRLNFGQTGDSESVPDPQPLGEPPAAPSGVGPNTMAAGGGAPMADNNEGADGVGSSSGNWHCDSTWLGDRVITTSTRTWALPTYNNHLYKQISNGTSGGATNDNTAAGYSTPWGYFDFNRFHCHFSPRDWQRLINNNWGFRPKRLSFKLFNIQVKEVTQNEGTKTIANNLTSTIQVFTDSEYQLPYVLGSAHQGCLPPFPADVFMIPQYGYLTLNNGSQAVGRSSFYCLEYFPSQMLRTGNNFQFTYTFEDVPFHSSYAHSQSLDRLMNPLIDQYLYYLSRTQTTGGTANTQTLGFSQGGPNTMANQAKNWLPGPCYRQQRVSTTTGQNNNSNFAWTAGTKYHLNGRNSLANPGIAMATHKDDEERFFPSNGILIFGKQNAARDNADYSDVMLTSEEEIKTTNPVATEEYGIVADNLQQQNTAPQIGTVNSQGALPGMVWQNRDVYLQGPIWAKIPHTDGNFHPSPLMGGFGLKHPPPQILIKNTPVPADPPTTFNQSKLNSFITQYSTGQVSVEIEWELQKENSKRWNPEIQYTSNYYKSTSVDFAVNTE

SEQ ID NO: 26 - protein, 720 aa, Adeno Associated Virus 8; identical to SEQ ID NO: 23

SEQ ID NO: 27 - protein, 720 aa, Adeno Associated Virus 8; identical to SEQ ID NO: 24

SEQ ID NO: 28 - protein, 720 aa, Adeno Associated Virus 8; identical to SEQ ID NO: 25

SEQ ID NO: 29 - protein, 720 aa, Adeno Associated Virus 8
MAADGYLPDWLEDNLSEGIREWWALKPGAPKPKANQQKQDDGRGLVLPGYKYLGPFNGLDKGEPVNAADAAALEHDKAYDQQLQAGDNPYLRYNHADAEFQERLQEDTSFGGNLGRAVFQAKKRVLEPLGLVEEGAKTAPGKKRPVEPSPQRSPDSSTGIGKKGQQPARKRLNFGQTGDSESVPDPQPLGEPPAAPSGVGPNTMAAGGGAPMADNNEGADGVGSSSGNWHCDSTWLGDRVITTSTRTWALPTYNNHLYKQISNGTSGGATNDNTYFAASTPWGYFDFNRFHCHFSPRDWQRLINNNWGFRPKRLSFKLFNIQVKEVTQNEGTKTIANNLTSTIQVFTDSEYQLPYVLGSAHQGCLPPFPADVFMIPQYGYLTLNNGSQAVGRSSFYCLEYFPSQMLRTGNNFQFTYTFEDVPFHSSYAHSQSLDRLMNPLIDQYLYYLSRTQTTGGTANTQTLGFSQGGPNTMANQAKNWLPGPCYRQQRVSTTTGQNNNSNFAWTAGTKYHLNGRNSLANPGIAMATHKDDEERFFPSNGILIFGKQNAARDNADYSDVMLTSEEEIKTTNPVATEEYGIVADNLQQQNTAPQIGTVNSQGALPGMVWQNRDVYLQGPIWAKIPHTDGNFHPSPLMGGFGLKHPPPQILIKNTPVPADPPTTFNQSKLNSFITQYSTGQVSVEIEWELQKENSKRWNPEIQYTSNYYKSTSVDFAVNTE

SEQ ID NO: 30 - protein, 720 aa, Adeno Associated Virus 8
MAADGYLPDWLEDNLSEGIREWWALKPGAPKPKANQQKQDDGRGLVLPGYKYLGPFNGLDKGEPVNAADAAALEHDKAYDQQLQAGDNPYLRYNHADAEFQERLQEDTSFGGNLGRAVFQAKKRVLEPLGLVEEGAKTAPGKKRPVEPSPQRSPDSSTGIGKKGQQPARKRLNFGQTGDSESVPDPQPLGEPPAAPSGVGPNTMAAGGGAPMADNNEGADGVGSSSGNWHCDSTWLGDRVITTSTRTWALPTYNNHLYKQISNGTSGGATNDNTYFGYSTPWGYFDFNRFHCHFSPRDWQRLINNNWGFRPKRLSFKLFNIQVKEVTQNEGTKTIANNLTSTIQVFTDSEYQLPYVLGSAHQGCLPPFPADVFMIPQYGYLTAANGSQAVGRSSFYCLEYFPSQMLRTGNNFQFTYTFEDVPFHSSYAHSQSLDRLMNPLIDQYLYYLSRTQTTGGTANTQTLGFSQGGPNTMANQAKNWLPGPCYRQQRVSTTTGQNNNSNFAWTAGTKYHLNGRNSLANPGIAMATHKDDEERFFPSNGILIFGKQNAARDNADYSDVMLTSEEEIKTTNPVATEEYGIVADNLQQQNTAPQIGTVNSQGALPGMVWQNRDVYLQGPIWAKIPHTDGNFHPSPLMGGFGLKHPPPQILIKNTPVPADPPTTFNQSKLNSFITQYSTGQVSVEIEWELQKENSKRWNPEIQYTSNYYKSTSVDFAVNTE

SEQ ID NO: 31 - protein, 720 aa, Adeno Associated Virus 8
MAADGYLPDWLEDNLSEGIREWWALKPGAPKPKANQQKQDDGRGLVLPGYKYLGPFNGLDKGEPVNAADAAALEHDKAYDQQLQAGDNPYLRYNHADAEFQERLQEDTSFGGNLGRAVFQAKKRVLEPLGLVEEGAKTAPGKKRPVEPSPQRSPDSSTGIGKKGQQPARKRLNFGQTGDSESVPDPQPLGEPPAAPSGVGPNTMAAGGGAPMADNNEGADGVGSSSGNWHCDSTWLGDRVITTSTRTWALPTYNNHLYKQISNGTSGGATNDNTYFGYSTPWGYFDFNRFHCHFSPRDWQRLINNNWGFRPKRLSFKLFNIQVKEVTQNEGTKTIANNLTSTIQVFTDSEYQLPYVLGSAHQGCLPPFPADVFMIPQYGYLTLNAASQAVGRSSFYCLEYFPSQMLRTGNNFQFTYTFEDVPFHSSYAHSQSLDRLMNPLIDQYLYYLSRTQTTGGTANTQTLGFSQGGPNTMANQAKNWLPGPCYRQQRVSTTTGQNNNSNFAWTAGTKYHLNGRNSLANPGIAMATHKDDEERFFPSNGILIFGKQNAARDNADYSDVMLTSEEEIKTTNPVATEEYGIVADNLQQQNTAPQIGTVNSQGALPGMVWQNRDVYLQGPIWAKIPHTDGNFHPSPLMGGFGLKHPPPQILIKNTPVPADPPTTFNQSKLNSFITQYSTGQVSVEIEWELQKENSKRWNPEIQYTSNYYKSTSVDFAVNTE

SEQ ID NO: 32 - protein, 738 aa, Adeno Associated Virus 8
MAADGYLPDWLEDNLSEGIREWWALKPGAPKPKANQQKQDDGRGLVLPGYKYLGPFNGLDKGEPVNAADAAALEHDKAYDQQLQAGDNPYLRYNHADAEFQERLQEDTSFGGNLGRAVFQAKKRVLEPLGLVEEGAKTAPGKKRPVEPSPQRSPDSSTGIGKKGQQPARKRLNFGQTGDSESVPDPQPLGEPPAAPSGVGPNTMAAGGGAPMADNNEGADGVGSSSGNWHCDSTWLGDRVITTSTRTWALPTYNNHLYKQISNGTSGGATNDNTYFGYSTPWGYFDFNRFHCHFSPRDWQRLINNNWGFRPKRLSFKLFNIQVKEVTQNEGTKTIANNLTSTIQVFTDSEYQLPYVLGSAHQGCLPPFPADVFMIPQYGYLTLNNGSQAVAASSFYCLEYFPSQMLRTGNNFQFTYTFEDVPFHSSYAHSQSLDRLMNPLIDQYLYYLSRTQTTGGTANTQTLGFSQGGPNTMANQAKNWLPGPCYRQQRVSTTTGQNNNSNFAWTAGTKYHLNGRNSLANPGIAMATHKDDEERFFPSNGILIFGKQNAARDNADYSDVMLTSEEEIKTTNPVATEEYGIVADNLQQQNTAPQIGTVNSQGALPGMVWQNRDVYLQGPIWAKIPHTDGNFHPSPLMGGFGLKHPPPQILIKNTPVPADPPTTFNQSKLNSFITQYSTGQVSVEIEWELQKENSKRWNPEIQYTSNYYKSTSVDFAVNTEGVYSEPRPIGTRYLTRNL

SEQ ID NO: 33 - protein, 738 aa, Adeno Associated Virus 8
MAADGYLPDWLEDNLSEGIREWWALKPGAPKPKANQQKQDDGRGLVLPGYKYLGPFNGLDKGEPVNAADAAALEHDKAYDQQLQAGDNPYLRYNHADAEFQERLQEDTSFGGNLGRAVFQAKKRVLEPLGLVEEGAKTAPGKKRPVEPSPQRSPDSSTGIGKKGQQPARKRLNFGQTGDSESVPDPQPLGEPPAAPSGVGPNTMAAGGGAPMADNNEGADGVGSSSGNWHCDSTWLGDRVITTSTRTWALPTYNNHLYKQISNGTSGGATNDNTYFGYSTPWGYFDFNRFHCHFSPRDWQRLINNNWGFRPKRLSFKLFNIQVKEVTQNEGTKTIANNLTSTIQVFTDSEYQLPYVLGSAHQGCLPPFPADVFMIPQYGYLTLNNGSQAVGRSSFYCLEYFPSQMLRTGNNFQFTYTFEDVPFHSSYAHSQSLDRLMNPLIDQYLYYLSRTQTTGGTANTQTLGFSQGGPNTMANQAKNWLPGPCYRQQRVSTTTGQNNNSNFAWTAGTKYHLNGRNSLANPGIAMATHKDDEERFFPSNGILIFGKQNAARDNADYSDVMLTSEEEIKTTNPVATEEYGIVADNLQQQNTAPQIGTVNSQGALPGMVWQNRDVYLQGPIWAKIPHTDGNFHPSPLMGGFGLKHPPPQILIKNTPVPADPPTTFNQSKLNSFITQYSTGQVSVEIEWELQKENSKRWNPEIQYAANYYKSTSVDFAVNTEGVYSEPRPIGTRYLTRNL

SEQ ID NO: 34 - protein, 738 aa, Adeno Associated Virus 8
MAADGYLPDWLEDNLSEGIREWWALKPGAPKPKANQQKQDDGRGLVLPGYKYLGPFNGLDKGEPVNAADAAALEHDKAYDQQLQAGDNPYLRYNHADAEFQERLQEDTSFGGNLGRAVFQAKKRVLEPLGLVEEGAKTAPGKKRPVEPSPQRSPDSSTGIGKKGQQPARKRLNFGQTGDSESVPDPQPLGEPPAAPSGVGPNTMAAGGGAPMADNNEGADGVGSSSGNWHCDSTWLGDRVITTSTRTWALPTYNNHLYKQISNGTSGGATNDNTYFGYSTPWGYFDFNRFHCHFSPRDWQRLINNNWGFRPKRLSFKLFNIQVKEVTQNEGTKTIANNLTSTIQVFTDSEYQLPYVLGSAHQGCLPPFPADVFMIPQYGYLTLNNGSQAVGRSSFYCLEYFPSQMLRTGNNFQFTYTFEDVPFHSSYAHSQSLDRLMNPLIDQYLYYLSRTQTTGGTANTQTLGFSQGGPNTMANQAKNWLPGPCYRQQRVSTTTGQNNNSNFAWTAGTKYHLNGRNSLANPGIAMATHKDDEERFFPSNGILIFGKQNAARDNADYSDVMLTSEEEIKTTNPVATEEYGIVADNLQQQNTAPQIGTVNSQGALPGMVWQNRDVYLQGPIWAKIPHTDGNFHPSPLMGGFGLKHPPPQILIKNTPVPADPPTTFNQSKLNSFITQYSTGQVSVEIEWELQKENSKRWNPEIQYTSAAYKSTSVDFAVNTEGVYSEPRPIGTRYLTRNL

SEQ ID NO: 35 - protein, 738 aa, Adeno Associated Virus 8
MAADGYLPDWLEDNLSEGIREWWALKPGAPKPKANQQKQDDGRGLVLPGYKYLGPFNGLDKGEPVNAADAAALEHDKAYDQQLQAGDNPYLRYNHADAEFQERLQEDTSFGGNLGRAVFQAKKRVLEPLGLVEEGAKTAPGKKRPVEPSPQRSPDSSTGIGKKGQQPARKRLNFGQTGDSESVPDPQPLGEPPAAPSGVGPNTMAAGGGAPMADNNEGADGVGSSSGNWHCDSTWLGDRVITTSTRTWALPTYNNHLYKQISNGTSGGATNDNTYFGYSTPWGYFDFNRFHCHFSPRDWQRLINNNWGFRPKRLSFKLFNIQVKEVTQNEGTKTIANNLTSTIQVFTDSEYQLPYVLGSAHQGCLPPFPADVFMIPQYGYLTLNNGSQAVGRSSFYCLEYFPSQMLRTGNNFQFTYTFEDVPFHSSYAHSQSLDRLMNPLIDQYLYYLSRTQTTGGTANTQTLGFSQGGPNTMANQAKNWLPGPCYRQQRVSTTTGQNNNSNFAWTAGTKYHLNGRNSLANPGIAMATHKDDEERFFPSNGILIFGKQNAARDNADYSDVMLTSEEEIKTTNPVATEEYGIVADNLQQQNTAPQIGTVNSQGALPGMVWQNRDVYLQGPIWAKIPHTDGNFHPSPLMGGFGLKHPPPQILIKNTPVPADPPTTFNQSKLNSFITQYSTGQVSVEIEWELQKENSKRWNPEIQYTSNYAASTSVDFAVNTEGVYSEPRPIGTRYLTRNL

SEQ ID NO: 36 - protein, 738 aa, Adeno Associated Virus 8
MAADGYLPDWLEDNLSEGIREWWALKPGAPKPKANQQKQDDGRGLVLPGYKYLGPFNGLDKGEPVNAADAAALEHDKAYDQQLQAGDNPYLRYNHADAEFQERLQEDTSFGGNLGRAVFQAKKRVLEPLGLVEEGAKTAPGKKRPVEPSPQRSPDSSTGIGKKGQQPARKRLNFGQTGDSESVPDPQPLGEPPAAPSGVGPNTMAAGGGAPMADNNEGADGVGSSSGNWHCDSTWLGDRVITTSTRTWALPTYNNHLYKQISNGTSGGATNDNTYFGYSTPWGYFDFNRFHCHFSPRDWQRLINNNWGFRPKRLSFKLFNIQVKEVTQNEGTKTIANNLTSTIQVFTDSEYQLPYVLGSAHQGCLPPFPADVFMIPQYGYLTLNNGSQAVGRSSFYCLEYFPSQMLRTGNNFQFTYTFEDVPFHSSYAHSQSLDRLMNPLIDQYLYYLSRTQTTGGTANTQTLGFSQGGPNTMANQAKNWLPGPCYRQQRVSTTTGQNNNSNFAWTAGTKYHLNGRNSLANPGIAMATHKDDEERFFPSNGILIFGKQNAARDNADYSDVMLTSEEEIKTTNPVATEEYGIVADNLQQQNTAPQIGTVNSQGALPGMVWQNRDVYLQGPIWAKIPHTDGNFHPSPLMGGFGLKHPPPQILIKNTPVPADPPTTFNQSKLNSFITQYSTGQVSVEIEWELQKENSKRWNPEIQYTSNYYKSTSVDFAVNTEGVYSEAAPIGTRYLTRNL

SEQ ID NO: 37 - protein, 738 aa, Adeno Associated Virus 8
MAADGYLPDWLEDNLSEGIREAAALKPGAPKPKANQQKQDDGRGLVLPGYKYLGPFNGLDKGEPVNAADAAALEHDKAYDQQLQAGDNPYLRYNHADAEFQERLQEDTSFGGNLGRAVFQAKKRVLEPLGLVEEGAKTAPGKKRPVEPSPQRSPDSSTGIGKKGQQPARKRLNFGQTGDSESVPDPQPLGEPPAAPSGVGPNTMAAGGGAPMADNNEGADGVGSSSGNWHCDSTWLGDRVITTSTRTWALPTYNNHLYKQISNGTSGGATNDNTYFGYSTPWGYFDFNRFHCHFSPRDWQRLINNNWGFRPKRLSFKLFNIQVKEVTQNEGTKTIANNLTSTIQVFTDSEYQLPYVLGSAHQGCLPPFPADVFMIPQYGYLTLNNGSQAVGRSSFYCLEYFPSQMLRTGNNFQFTYTFEDVPFHSSYAHSQSLDRLMNPLIDQYLYYLSRTQTTGGTANTQTLGFSQGGPNTMANQAKNWLPGPCYRQQRVSTTTGQNNNSNFAWTAGTKYHLNGRNSLANPGIAMATHKDDEERFFPSNGILIFGKQNAARDNADYSDVMLTSEEEIKTTNPVATEEYGIVADNLQQQNTAPQIGTVNSQGALPGMVWQNRDVYLQGPIWAKIPHTDGNFHPSPLMGGFGLKHPPPQILIKNTPVPADPPTTFNQSKLNSFITQYSTGQVSVEIEWELQKENSKRWNPEIQYTSNYYKSTSVDFAVNTEGVYSEPRPIGTRYLTRNL

SEQ ID NO: 38 - protein, 738 aa, Adeno Associated Virus 8
MAADGYLPDWLEDNLSEGIREWWALKPGAPKPKANQQKQDDGRAAVLPGYKYLGPFNGLDKGEPVNAADAAALEHDKAYDQQLQAGDNPYLRYNHADAEFQERLQEDTSFGGNLGRAVFQAKKRVLEPLGLVEEGAKTAPGKKRPVEPSPQRSPDSSTGIGKKGQQPARKRLNFGQTGDSESVPDPQPLGEPPAAPSGVGPNTMAAGGGAPMADNNEGADGVGSSSGNWHCDSTWLGDRVITTSTRTWALPTYNNHLYKQISNGTSGGATNDNTYFGYSTPWGYFDFNRFHCHFSPRDWQRLINNNWGFRPKRLSFKLFNIQVKEVTQNEGTKTIANNLTSTIQVFTDSEYQLPYVLGSAHQGCLPPFPADVFMIPQYGYLTLNNGSQAVGRSSFYCLEYFPSQMLRTGNNFQFTYTFEDVPFHSSYAHSQSLDRLMNPLIDQYLYYLSRTQTTGGTANTQTLGFSQGGPNTMANQAKNWLPGPCYRQQRVSTTTGQNNNSNFAWTAGTKYHLNGRNSLANPGIAMATHKDDEERFFPSNGILIFGKQNAARDNADYSDVMLTSEEEIKTTNPVATEEYGIVADNLQQQNTAPQIGTVNSQGALPGMVWQNRDVYLQGPIWAKIPHTDGNFHPSPLMGGFGLKHPPPQILIKNTPVPADPPTTFNQSKLNSFITQYSTGQVSVEIEWELQKENSKRWNPEIQYTSNYYKSTSVDFAVNTEGVYSEPRPIGTRYLTRNL

SEQ ID NO: 39 - protein, 738 aa, Adeno Associated Virus 8
MAADGYLPDWLEDNLSEGIREWWALKPGAPKPKANQQKQDDGRGLAAPGYKYLGPFNGLDKGEPVNAADAAALEHDKAYDQQLQAGDNPYLRYNHADAEFQERLQEDTSFGGNLGRAVFQAKKRVLEPLGLVEEGAKTAPGKKRPVEPSPQRSPDSSTGIGKKGQQPARKRLNFGQTGDSESVPDPQPLGEPPAAPSGVGPNTMAAGGGAPMADNNEGADGVGSSSGNWHCDSTWLGDRVITTSTRTWALPTYNNHLYKQISNGTSGGATNDNTYFGYSTPWGYFDFNRFHCHFSPRDWQRLINNNWGFRPKRLSFKLFNIQVKEVTQNEGTKTIANNLTSTIQVFTDSEYQLPYVLGSAHQGCLPPFPADVFMIPQYGYLTLNNGSQAVGRSSFYCLEYFPSQMLRTGNNFQFTYTFEDVPFHSSYAHSQSLDRLMNPLIDQYLYYLSRTQTTGGTANTQTLGFSQGGPNTMANQAKNWLPGPCYRQQRVSTTTGQNNNSNFAWTAGTKYHLNGRNSLANPGIAMATHKDDEERFFPSNGILIFGKQNAARDNADYSDVMLTSEEEIKTTNPVATEEYGIVADNLQQQNTAPQIGTVNSQGALPGMVWQNRDVYLQGPIWAKIPHTDGNFHPSPLMGGFGLKHPPPQILIKNTPVPADPPTTFNQSKLNSFITQYSTGQVSVEIEWELQKENSKRWNPEIQYTSNYYKSTSVDFAVNTEGVYSEPRPIGTRYLTRNL

SEQ ID NO: 40 - protein, 738 aa, Adeno Associated Virus 8
MAADGYLPDWLEDNLSEGIREWWALKPGAPKPKANQQKQDDGRGLVLPGYKYLGPFNGLDKGEPVNAADAAALEHDKAYDQQLQAGDNPYLAANHADAEFQERLQEDTSFGGNLGRAVFQAKKRVLEPLGLVEEGAKTAPGKKRPVEPSPQRSPDSSTGIGKKGQQPARKRLNFGQTGDSESVPDPQPLGEPPAAPSGVGPNTMAAGGGAPMADNNEGADGVGSSSGNWHCDSTWLGDRVITTSTRTWALPTYNNHLYKQISNGTSGGATNDNTYFGYSTPWGYFDFNRFHCHFSPRDWQRLINNNWGFRPKRLSFKLFNIQVKEVTQNEGTKTIANNLTSTIQVFTDSEYQLPYVLGSAHQGCLPPFPADVFMIPQYGYLTLNNGSQAVGRSSFYCLEYFPSQMLRTGNNFQFTYTFEDVPFHSSYAHSQSLDRLMNPLIDQYLYYLSRTQTTGGTANTQTLGFSQGGPNTMANQAKNWLPGPCYRQQRVSTTTGQNNNSNFAWTAGTKYHLNGRNSLANPGIAMATHKDDEERFFPSNGILIFGKQNAARDNADYSDVMLTSEEEIKTTNPVATEEYGIVADNLQQQNTAPQIGTVNSQGALPGMVWQNRDVYLQGPIWAKIPHTDGNFHPSPLMGGFGLKHPPPQILIKNTPVPADPPTTFNQSKLNSFITQYSTGQVSVEIEWELQKENSKRWNPEIQYTSNYYKSTSVDFAVNTEGVYSEPRPIGTRYLTRNL

SEQ ID NO: 41 - protein, 738 aa, Adeno Associated Virus 8
MAADGYLPDWLEDNLSEGIREWWALKPGAPKPKANQQKQDDGRGLVLPGYKYLGPFNGLDKGEPVNAADAAALEHDKAYDQQLQAGDNPYLRYNHADAEFQERLQEDTSFGGNLGRAVFQAKKRVLEPLGLVEEGAKTAPGKKRPVEPSPQRSPDSSTGIGKKGQQPARKRLNFGQTGDSESVPDPQPLGEPPAAPSGVGPNTMAAGGGAPMADNNEGADGVGSSSGNWHCDSTWLGDRVITTSTRTWALPTYNNHLYKQISNGTSGGAANDNTYFGYSTPWGYFDFNRFHCHFSPRDWQRLINNNWGFRPKRLSFKLFNIQVKEVTQNEGTKTIANNLTSTIQVFTDSEYQLPYVLGSAHQGCLPPFPADVFMIPQYGYLTLNNGSQAVGRSSFYCLEYFPSQMLRTGNNFQFTYTFEDVPFHSSYAHSQSLDRLMNPLIDQYLYYLSRTQTTGGTANTQTLGFSQGGPNTMANQAKNWLPGPCYRQQRVSTTTGQNNNSNFAWTAGTKYHLNGRNSLANPGIAMATHKDDEERFFPSNGILIFGKQNAARDNADYSDVMLTSEEEIKTTNPVATEEYGIVADNLQQQNTAPQIGTVNSQGALPGMVWQNRDVYLQGPIWAKIPHTDGNFHPSPLMGGFGLKHPPPQILIKNTPVPADPPTTFNQSKLNSFITQYSTGQVSVEIEWELQKENSKRWNPEIQYTSNYYKSTSVDFAVNTEGVYSEPRPIGTRYLTRNL

SEQ ID NO: 42 - protein, 738 aa, Adeno Associated Virus 8
MAADGYLPDWLEDNLSEGIREWWALKPGAPKPKANQQKQDDGRGLVLPGYKYLGPFNGLDKGEPVNAADAAALEHDKAYDQQLQAGDNPYLRYNHADAEFQERLQEDTSFGGNLGRAVFQAKKRVLEPLGLVEEGAKTAPGKKRPVEPSPQRSPDSSTGIGKKGQQPARKRLNFGQTGDSESVPDPQPLGEPPAAPSGVGPNTMAAGGGAPMADNNEGADGVGSSSGNWHCDSTWLGDRVITTSTRTWALPTYNNHLYKQISNGTSGGATNDNTYFGYSTPWGYFDFNRFHCHFSPRDWQRLINNNWGFRPKRLSFKLFNIQVKEVTQNEGTKTIANNAASTIQVFTDSEYQLPYVLGSAHQGCLPPFPADVFMIPQYGYLTLNNGSQAVGRSSFYCLEYFPSQMLRTGNNFQFTYTFEDVPFHSSYAHSQSLDRLMNPLIDQYLYYLSRTQTTGGTANTQTLGFSQGGPNTMANQAKNWLPGPCYRQQRVSTTTGQNNNSNFAWTAGTKYHLNGRNSLANPGIAMATHKDDEERFFPSNGILIFGKQNAARDNADYSDVMLTSEEEIKTTNPVATEEYGIVADNLQQQNTAPQIGTVNSQGALPGMVWQNRDVYLQGPIWAKIPHTDGNFHPSPLMGGFGLKHPPPQILIKNTPVPADPPTTFNQSKLNSFITQYSTGQVSVEIEWELQKENSKRWNPEIQYTSNYYKSTSVDFAVNTEGVYSEPRPIGTRYLTRNL

SEQ ID NO: 43 - protein, 738 aa, Adeno Associated Virus 8
MAADGYLPDWLEDNLSEGIREWWALKPGAPKPKANQQKQDDGRGLVLPGYKYLGPFNGLDKGEPVNAADAAALEHDKAYDQQLQAGDNPYLRYNHADAEFQERLQEDTSFGGNLGRAVFQAKKRVLEPLGLVEEGAKTAPGKKRPVEPSPQRSPDSSTGIGKKGQQPARKRLNFGQTGDSESVPDPQPLGEPPAAPSGVGPNTMAAGGGAPMADNNEGADGVGSSSGNWHCDSTWLGDRVITTSTRTWALPTYNNHLYKQISNGTSGGATNDNTYFGYSTPWGYFDFNRFHCHFSPRDWQRLINNNWGFRPKRLSFKLFNIQVKEVTQNEGTKTIANNLTSTIQVFTDSEYQLPYVLGSAHQGCLPPFPADVFMIPQYGYLTLNNGSQAVGRSSFYCLEYFPSQMLRTGNNFQFTYTFEDVPFHSSYAHSQSLDRLMNPLIDQYLYYLSRTQTTGGTANTQTLGFSQGGPNTMANQAKNWLPGPCYRQQRVSTTTGQNNNSNFAATAGTKYHLNGRNSLANPGIAMATHKDDEERFFPSNGILIFGKQNAARDNADYSDVMLTSEEEIKTTNPVATEEYGIVADNLQQQNTAPQIGTVNSQGALPGMVWQNRDVYLQGPIWAKIPHTDGNFHPSPLMGGFGLKHPPPQILIKNTPVPADPPTTFNQSKLNSFITQYSTGQVSVEIEWELQKENSKRWNPEIQYTSNYYKSTSVDFAVNTEGVYSEPRPIGTRYLTRNL

SEQ ID NO: 44 - protein, 738 aa, Adeno Associated Virus 8
MAADGYLPDWLEDNLSEGIREWWALKPGAPKPKANQQKQDDGRGLVLPGYKYLGPFNGLDKGEPVNAADAAALEHDKAYDQQLQAGDNPYLRYNHADAEFQERLQEDTSFGGNLGRAVFQAKKRVLEPLGLVEEGAKTAPGKKRPVEPSPQRSPDSSTGIGKKGQQPARKRLNFGQTGDSESVPDPQPLGEPPAAPSGVGPNTMAAGGGAPMADNNEGADGVGSSSGNWHCDSTWLGDRVITTSTRTWALPTYNNHLYKQISNGTSGGATNDNTYFGYSTPWGYFDFNRFHCHFSPRDWQRLINNNWGFRPKRLSFKLFNIQVKEVTQNEGTKTIANNLTSTIQVFTDSEYQLPYVLGSAHQGCLPPFPADVFMIPQYGYLTLNNGSQAVGRSSFYCLEYFPSQMLRTGNNFQFTYTFEDVPFHSSYAHSQSLDRLMNPLIDQYLYYLSRTQTTGGTANTQTLGFSQGGPNTMANQAKNWLPGPCYRQQRVSTTTGQNNNSNFAWTAGTKYHLNGRNSLANPGIAMATHKDAAERFFPSNGILIFGKQNAARDNADYSDVMLTSEEEIKTTNPVATEEYGIVADNLQQQNTAPQIGTVNSQGALPGMVWQNRDVYLQGPIWAKIPHTDGNFHPSPLMGGFGLKHPPPQILIKNTPVPADPPTTFNQSKLNSFITQYSTGQVSVEIEWELQKENSKRWNPEIQYTSNYYKSTSVDFAVNTEGVYSEPRPIGTRYLTRNL

SEQ ID NO: 45 - protein, 738 aa, Adeno Associated Virus 8
MAADGYLPDWLEDNLSEGIREWWALKPGAPKPKANQQKQDDGRGLVLPGYKYLGPFNGLDKGEPVNAADAAALEHDKAYDQQLQAGDNPYLRYNHADAEFQERLQEDTSFGGNLGRAVFQAKKRVLEPLGLVEEGAKTAPGKKRPVEPSPQRSPDSSTGIGKKGQQPARKRLNFGQTGDSESVPDPQPLGEPPAAPSGVGPNTMAAGGGAPMADNNEGADGVGSSSGNWHCDSTWLGDRVITTSTRTWALPTYNNHLYKQISNGTSGGATNDNTYFGYSTPWGYFDFNRFHCHFSPRDWQRLINNNWGFRPKRLSFKLFNIQVKEVTQNEGTKTIANNLTSTIQVFTDSEYQLPYVLGSAHQGCLPPFPADVFMIPQYGYLTLNNGSQAVGRSSFYCLEYFPSQMLRTGNNFQFTYTFEDVPFHSSYAHSQSLDRLMNPLIDQYLYYLSRTQTTGGTANTQTLGFSQGGPNTMANQAKNWLPGPCYRQQRVSTTTGQNNNSNFAWTAGTKYHLNGRNSLANPGIAMATHKDDEERFFPSNGILIFGKQNAARDNADYSDVMLTAAEEIKTTNPVATEEYGIVADNLQQQNTAPQIGTVNSQGALPGMVWQNRDVYLQGPIWAKIPHTDGNFHPSPLMGGFGLKHPPPQILIKNTPVPADPPTTFNQSKLNSFITQYSTGQVSVEIEWELQKENSKRWNPEIQYTSNYYKSTSVDFAVNTEGVYSEPRPIGTRYLTRNL

SEQ ID NO: 46 - protein, 738 aa, Adeno Associated Virus 8
MAADGYLPDWLEDNLSEGIREWWALKPGAPKPKANQQKQDDGRGLVLPGYKYLGPFNGLDKGEPVNAADAAALEHDKAYDQQLQAGDNPYLRYNHADAEFQERLQEDTSFGGNLGRAVFQAKKRVLEPLGLVEEGAKTAPGKKRPVEPSPQRSPDSSTGIGKKGQQPARKRLNFGQTGDSESVPDPQPLGEPPAAPSGVGPNTMAAGGGAPMADNNEGADGVGSSSGNWHCDSTWLGDRVITTSTRTWALPTYNNHLYKQISNGTSGGATAANTYFGYSTPWGYFDFNRFHCHFSPRDWQRLINNNWGFRPKRLSFKLFNIQVKEVTQNEGTKTIANNLTSTIQVFTDSEYQLPYVLGSAHQGCLPPFPADVFMIPQYGYLTLNNGSQAVGRSSFYCLEYFPSQMLRTGNNFQFTYTFEDVPFHSSYAHSQSLDRLMNPLIDQYLYYLSRTQTTGGTANTQTLGFSQGGPNTMANQAKNWLPGPCYRQQRVSTTTGQNNNSNFAWTAGTKYHLNGRNSLANPGIAMATHKDDEERFFPSNGILIFGKQNAARDNADYSDVMLTSEEEIKTTNPVATEEYGIVADNLQQQNTAPQIGTVNSQGALPGMVWQNRDVYLQGPIWAKIPHTDGNFHPSPLMGGFGLKHPPPQILIKNTPVPADPPTTFNQSKLNSFITQYSTGQVSVEIEWELQKENSKRWNPEIQYTSNYYKSTSVDFAVNTEGVYSEPRPIGTRYLTRNL

SEQ ID NO: 47 - protein, 738 aa, Adeno Associated Virus 8
MAADGYLPDWLEDNLSEGIREWWALKPGAPKPKANQQKQDDGRGLVLPGYKYLGPFNGLDKGEPVNAADAAALEHDKAYDQQLQAGDNPYLRYNHADAEFQERLQEDTSFGGNLGRAVFQAKKRVLEPLGLVEEGAKTAPGKKRPVEPSPQRSPDSSTGIGKKGQQPARKRLNFGQTGDSESVPDPQPLGEPPAAPSGVGPNTMAAGGGAPMADNNEGADGVGSSSGNWHCDSTWLGDRVITTSTRTWALPTYNNHLYKQISNGTSGGATNDNTYFGYSTPWGYFDFNRFHCHFSPRDWQRLINNNWGFRPKRLSFKLFNIQVKEVTQNEGTKTIANNLTSTIQVFTDSEYQLPYVLGSAHQGCLPPFPADVFMIPQYGYLTLNNGAAAVGRSSFYCLEYFPSQMLRTGNNFQFTYTFEDVPFHSSYAHSQSLDRLMNPLIDQYLYYLSRTQTTGGTANTQTLGFSQGGPNTMANQAKNWLPGPCYRQQRVSTTTGQNNNSNFAWTAGTKYHLNGRNSLANPGIAMATHKDDEERFFPSNGILIFGKQNAARDNADYSDVMLTSEEEIKTTNPVATEEYGIVADNLQQQNTAPQIGTVNSQGALPGMVWQNRDVYLQGPIWAKIPHTDGNFHPSPLMGGFGLKHPPPQILIKNTPVPADPPTTFNQSKLNSFITQYSTGQVSVEIEWELQKENSKRWNPEIQYTSNYYKSTSVDFAVNTEGVYSEPRPIGTRYLTRNL

SEQ ID NO: 48 - protein, 738 aa, Adeno Associated Virus 8
MAADGYLPDWLEDNLSEGIREWWALKPGAPKPKANQQKQDDGRGLVLPGYKYLGPFNGLDKGEPVNAADAAALEHDKAYDQQLQAGDNPYLRYNHADAEFQERLQEDTSFGGNLGRAVFQAKKRVLEPLGLVEEGAKTAPGKKRPVEPSPQRSPDSSTGIGKKGQQPARKRLNFGQTGDSESVPDPQPLGEPPAAPSGVGPNTMAAGGGAPMADNNEGADGVGSSSGNWHCDSTWLGDRVITTSTRTWALPTYNNHLYKQISNGTSGGATNDNTYFGYSTPWGYFDFNRFHCHFSPRDWQRLINNNWGFRPKRLSFKLFNIQVKEVTQNEGTKTIANNLTSTIQVFTDSEYQLPYVLGSAHQGCLPPFPADVFMIPQYGYLTLNNGSQAVGRSSFYCLEYFPSQMLRTGNNFQFTYTFEDVPFHSSYAHSQSLDRLMNPLIDQYLYYLSRTQTTGGTANTQTLGFSQGGPNTMANQAKNWLPGPCYRQQRVSTTTGQNNNSNFAWTAGTKYHLNGRNSLANPGIAMAAAKDDEERFFPSNGILIFGKQNAARDNADYSDVMLTSEEEIKTTNPVATEEYGIVADNLQQQNTAPQIGTVNSQGALPGMVWQNRDVYLQGPIWAKIPHTDGNFHPSPLMGGFGLKHPPPQILIKNTPVPADPPTTFNQSKLNSFITQYSTGQVSVEIEWELQKENSKRWNPEIQYTSNYYKSTSVDFAVNTEGVYSEPRPIGTRYLTRNL

SEQ ID NO: 49 - protein, 738 aa, Adeno Associated Virus 8
MAADGYLPDWLEDNLSEGIREWWALKPGAPKPKANQQKQDDGRGLVLPGYKYLGPFNGLDKGEPVNAADAAALEHDKAYDQQLQAGDNPYLRYNHADAEFQERLQEDTSFGGNLGRAVFQAKKRVLEPLGLVEEGAKTAPGKKRPVEPSPQRSPDSSTGIGKKGQQPARKRLNFGQTGDSESVPDPQPLGEPPAAPSGVGPNTMAAGGGAPMADNNEGADGVGSSSGNWHCDSTWLGDRVITTSTRTWALPTYNNHLYKQISNGTSGGATNDNTYFGYSTPWGYFDFNRFHCHFSPRDWQRLINNNWGFRPKRLSFKLFNIQVKEVTQNEGTKTIANNLTSTIQVFTDSEYQLPYVLGSAHQGCLPPFPADVFMIPQYGYLTLNNGSQAVGRSSFYCLEYFPSQMLRTGNNFQFTYTFEDVPFHSSYAHSQSLDRLMNPLIDQYLYYLSRTQTTGGTANTQTLGFSQGGPNTMANQAKNWLPGPCYRQQRVSTTTGQNNNSNFAWTAGTKYHLNGRNSLANPGIAMATHKDDEERFFPSNGILIFGKQNAARDNADYSDVMLTSEAAIKTTNPVATEEYGIVADNLQQQNTAPQIGTVNSQGALPGMVWQNRDVYLQGPIWAKIPHTDGNFHPSPLMGGFGLKHPPPQILIKNTPVPADPPTTFNQSKLNSFITQYSTGQVSVEIEWELQKENSKRWNPEIQYTSNYYKSTSVDFAVNTEGVYSEPRPIGTRYLTRNL

SEQ ID NO: 50 - protein, 738 aa, Adeno Associated Virus 8
MAADGYLPDWLEDNLSEGIREWWALKPGAPKPKANQQKQDDGRGLVLPGYKYLGPFNGLDKGEPVNAADAAALEHDKAYDQQLQAGDNPYLRYNHADAEFQERLQEDTSFGGNLGRAVFQAKKRVLEPLGLVEEGAKTAPGKKRPVEPSPQRSPDSSTGIGKKGQQPARKRLNFGQTGDSESVPDPQPLGEPPAAPSGVGPNTMAAGGGAPMADNNEGADGVGSSSGNWHCDSTWLGDRVITTSTRTWALPTYNNHLYKQISNGTSGGATNDNTYFGYSTPWGYFDFNRFHCHFSPRDWQRLINNNWGFRPKRLSFKLFNIQVKEVTQNEGTKTAANNLTSTIQVFTDSEYQLPYVLGSAHQGCLPPFPADVFMIPQYGYLTLNNGSQAVGRSSFYCLEYFPSQMLRTGNNFQFTYTFEDVPFHSSYAHSQSLDRLMNPLIDQYLYYLSRTQTTGGTANTQTLGFSQGGPNTMANQAKNWLPGPCYRQQRVSTTTGQNNNSNFAWTAGTKYHLNGRNSLANPGIAMATHKDDEERFFPSNGILIFGKQNAARDNADYSDVMLTSEEEIKTTNPVATEEYGIVADNLQQQNTAPQIGTVNSQGALPGMVWQNRDVYLQGPIWAKIPHTDGNFHPSPLMGGFGLKHPPPQILIKNTPVPADPPTTFNQSKLNSFITQYSTGQVSVEIEWELQKENSKRWNPEIQYTSNYYKSTSVDFAVNTEGVYSEPRPIGTRYLTRNL

SEQ ID NO: 51 - protein, 738 aa, Adeno Associated Virus 8
MAADGYLPDWLEDNLSEGIREWWALKPGAPKPKANQQKQDDGRGLVLPGYKYLGPFNGLAAGEPVNAADAAALEHDKAYDQQLQAGDNPYLRYNHADAEFQERLQEDTSFGGNLGRAVFQAKKRVLEPLGLVEEGAKTAPGKKRPVEPSPQRSPDSSTGIGKKGQQPARKRLNFGQTGDSESVPDPQPLGEPPAAPSGVGPNTMAAGGGAPMADNNEGADGVGSSSGNWHCDSTWLGDRVITTSTRTWALPTYNNHLYKQISNGTSGGATNDNTYFGYSTPWGYFDFNRFHCHFSPRDWQRLINNNWGFRPKRLSFKLFNIQVKEVTQNEGTKTIANNLTSTIQVFTDSEYQLPYVLGSAHQGCLPPFPADVFMIPQYGYLTLNNGSQAVGRSSFYCLEYFPSQMLRTGNNFQFTYTFEDVPFHSSYAHSQSLDRLMNPLIDQYLYYLSRTQTTGGTANTQTLGFSQGGPNTMANQAKNWLPGPCYRQQRVSTTTGQNNNSNFAWTAGTKYHLNGRNSLANPGIAMATHKDDEERFFPSNGILIFGKQNAARDNADYSDVMLTSEEEIKTTNPVATEEYGIVADNLQQQNTAPQIGTVNSQGALPGMVWQNRDVYLQGPIWAKIPHTDGNFHPSPLMGGFGLKHPPPQILIKNTPVPADPPTTFNQSKLNSFITQYSTGQVSVEIEWELQKENSKRWNPEIQYTSNYYKSTSVDFAVNTEGVYSEPRPIGTRYLTRNL

SEQ ID NO: 52 - protein, 738 aa, Adeno Associated Virus 8
MAADGYLPDWLEDNLSEGIREWWALKPGAPKPKANQQKQDDGRGLVLPGYKYLGPFNGLDKGEPVNAADAAALEHDKAYDQQLQAGDNPYLRYNHADAEFQERLQEDTSFGGNLGRAVFQAKKRVLEPLGLVEEGAKTAPGKKRPVEPSPQRSPDSSTGIGKKGQQPARKRLNFGQTGDSESVPDPQPLGEPPAAPSGVGPNTMAAGGGAPMADNNEGADGVGSSSGNWHCDSTWLGDRVITTSTRTWALPTYNAALYKQISNGTSGGATNDNTYFGYSTPWGYFDFNRFHCHFSPRDWQRLINNNWGFRPKRLSFKLFNIQVKEVTQNEGTKTIANNLTSTIQVFTDSEYQLPYVLGSAHQGCLPPFPADVFMIPQYGYLTLNNGSQAVGRSSFYCLEYFPSQMLRTGNNFQFTYTFEDVPFHSSYAHSQSLDRLMNPLIDQYLYYLSRTQTTGGTANTQTLGFSQGGPNTMANQAKNWLPGPCYRQQRVSTTTGQNNNSNFAWTAGTKYHLNGRNSLANPGIAMATHKDDEERFFPSNGILIFGKQNAARDNADYSDVMLTSEEEIKTTNPVATEEYGIVADNLQQQNTAPQIGTVNSQGALPGMVWQNRDVYLQGPIWAKIPHTDGNFHPSPLMGGFGLKHPPPQILIKNTPVPADPPTTFNQSKLNSFITQYSTGQVSVEIEWELQKENSKRWNPEIQYTSNYYKSTSVDFAVNTEGVYSEPRPIGTRYLTRNL

SEQ ID NO: 53 - protein, 738 aa, Adeno Associated Virus 8
MAADGYLPDWLEDNLSEGIREWWALKPGAPKPKANQQKQDDGRGLVLPGYKYLGPFNGLDKGEPVNAADAAALEHDKAYDQQLQAGDNPYLRYNHADAEFQERLQEDTSFGGNLGRAVFQAKKRVLEPLGLVEEGAKTAPGKKRPVEPSPQRSPDSSTGIGKKGQQPARKRLNFGQTGDSESVPDPQPLGEPPAAPSGVGPNTMAAGGGAPMADNNEGADGVGSSSGNWHCDSTWLGDRVITTSTRTWALPTYNNHLYKQISNGTSGGATNDNTYFGYSTPWGYFDFNRFHCHFSPRDWQRLINNNWGFRPKRLSFKLFNIQVKEVTQNEGTKTIANNLTSTIQVFTDSEYQLPYVLGSAHQGCLPPFPADVFMIPQYGYLTLNNGSQAVGRSSFYCLEYFPSQMLRTGNNFQFTYTFEDVPFHSSYAHSQSLDRLMNPLIDQYLYYLSRTQTTGGTANTQTLGFSQGGPNTMANQAKNWLPGPCYRQQRVSTTTGQNNNSNFAWTAGTKYHLNGRNSLANPGIAMATHKDDEERFFPSNGILIFGKQNAARDNADYSDVMLTSEEEIKTTNPVATEEYGIVADNLQQQNTAPQIGTVNSQGALPGMVWQNRDVYLQGPIWAKIPHTDGNFHPSPLMGGFGLKHPPPQILIKNTPVPADPPTTFNQSKLNSFITQYSTGQVSVEIEWELQKENSKRWNPEIQYTSNYYKSTSVDFAANTEGVYSEPRPIGTRYLTRNL

SEQ ID NO: 54 - protein, 738 aa, Adeno Associated Virus 8
MAADGYLPDWLEDNLSEGIREWWALKPGAPKPKANQQKQDDGRGLVLPGYKYLGPFNGLDKGEPVNAADAAALEHDKAYDQQLQAGDNPYLRYNHADAEFQERLQEDTSFGGNLGRAVFQAKKRVLEPLGLVEEGAKTAPGKKRPVEPSPQRSPDSSTGIGKKGQQPARKRLNFGQTGDSESVPDPQPLGEPPAAPSGVGPNTMAAGGGAPMADNNEGADGVGSSSGNWHCDSTWLGDRVITTSTRTWALPTYNNHLYAAISNGTSGGATNDNTYFGYSTPWGYFDFNRFHCHFSPRDWQRLINNNWGFRPKRLSFKLFNIQVKEVTQNEGTKTIANNLTSTIQVFTDSEYQLPYVLGSAHQGCLPPFPADVFMIPQYGYLTLNNGSQAVGRSSFYCLEYFPSQMLRTGNNFQFTYTFEDVPFHSSYAHSQSLDRLMNPLIDQYLYYLSRTQTTGGTANTQTLGFSQGGPNTMANQAKNWLPGPCYRQQRVSTTTGQNNNSNFAWTAGTKYHLNGRNSLANPGIAMATHKDDEERFFPSNGILIFGKQNAARDNADYSDVMLTSEEEIKTTNPVATEEYGIVADNLQQQNTAPQIGTVNSQGALPGMVWQNRDVYLQGPIWAKIPHTDGNFHPSPLMGGFGLKHPPPQILIKNTPVPADPPTTFNQSKLNSFITQYSTGQVSVEIEWELQKENSKRWNPEIQYTSNYYKSTSVDFAVNTEGVYSEPRPIGTRYLTRNL

SEQ ID NO: 55 - protein, 738 aa, Adeno Associated Virus 8
MAADGYLPDWLEDNLSEGIREWWALKPGAPKPKANQQKQDDGRGLVLPGYKYLGPFNGLDKGEPVNAADAAALEHDKAYDQQLQAGDNPYLRYNHADAEFQERLQEDTSFGGNLGRAVFQAKKRVLEPLGLVEEGAKTAPGKKRPVEPSPQRSPDSSTGIGKKGQQPARKRLNFGQTGDSESVPDPQPLGEPPAAPSGVGPNTMAAGGGAPMADNNEGADGVGSSSGNWHCDSTWLGDRVITTSTRTWALPTYNNHLYKQISNGTSGGATNDNTYFGYSTPWGYFDFNRFHCHFSPRDWQRLINNNWGFRPKRLSFKLFNIQVKEVTQNEGTKTIANNLTSTIQVFTDSEYQLPYVLGSAHQGCLPPFPADVFMIPQYGYLTLNNGSQAVGRSSFYCLEYFPSQMLRTGNNFQFTYTFEDVPFHSSYAHSQSLDRLMNPLIDQYLYYLSRTQTTGGTANTQTLGFSQGGPNTMANQAKNWLPGPCYRQQRVSTTTGQNNNSNFAWTAGTKYHLNGRNSLANPGIAMATHAADEERFFPSNGILIFGKQNAARDNADYSDVMLTSEEEIKTTNPVATEEYGIVADNLQQQNTAPQIGTVNSQGALPGMVWQNRDVYLQGPIWAKIPHTDGNFHPSPLMGGFGLKHPPPQILIKNTPVPADPPTTFNQSKLNSFITQYSTGQVSVEIEWELQKENSKRWNPEIQYTSNYYKSTSVDFAVNTEGVYSEPRPIGTRYLTRNL

SEQ ID NO: 56 - protein, 738 aa, Adeno Associated Virus 8
MAADGYLPDWLEDNLSEGIREWWALKPGAPKPKANQQKQDDGRGLVLPGYKYLGPFNGLDKGEPVNAADAAALEHDKAYDQQLQAGDNPYLRYNHADAEFQERLQEDTSFGGNLGRAVFQAKKRVLEPLGLVEEGAKTAPGKKRPVEPSPQRSPDSSTGIGKKGQQPARKRLNFGQTGDSESVPDPQPLGEPPAAPSGVGPNTMAAGGGAPMADNNEGADGVGSSSGNWHCDSTWLGDRVITTSTRTWALPTYNNHLYKQISNGTSGGATNDNTYFGYSTPWGYFDFNRFHCHFSPRDWQRLINNNWGFRPKRLSFKLFNIQVKEVTQNEGTKTIANNLTSTIQVFTDSEYQLPYVLGSAHQGCLPPFPADVFMIPQYGYLTLNNGSQAVGRSSFYCLEYFPSQMLRTGNNFQFTYTFEDVPFHSSYAHSQSLDRLMNPLIDQYLYYLSRTQTTGGTANTQTLGFSQGGPNTMANQAKNWLPGPCYRQQRVSTTTGQNNNSNFAWTAGTKYHLNGRNSLANPGIAMATHKDDEERFFPSNGILIFGKQNAARDNADYSDVMLTSEEEIKTTNPVATEEYGIVADNLQQQNTAPQIGTVNSQGALPGMVWQNRDVYLQGPIWAKIPHTDGNFHPSPLMGGFGLKHPPPQILIKNTPVPADPPTTFNQSKLNSFITQYSTGQVSVEIEWELQKENSKRWNPEIQYTSNYYKSTAADFAVNTEGVYSEPRPIGTRYLTRNL

SEQ ID NO: 57 - protein, 738 aa, Adeno Associated Virus 8
MAADGYLPDWLEDNLSEGIREWWALKPGAPKAAANQQKQDDGRGLVLPGYKYLGPFNGLDKGEPVNAADAAALEHDKAYDQQLQAGDAAYLRYNHADAEFQERLQEDTSFGGNLGRAVFQAKKRVLEPLGLVEEGAKTAPGKKRPVEPSPQRSPDSSTGIGKKGQQPARKRLNFGQTGDSESVPDPQPLGEPPAAPSGVGPNTMAAGGGAPMADNNEGADGVGSSSGNWHCDSTWLGDRVITTSTRTWALPTYNNHLYKQISNGTSGGATNDNTYFGYSTPWGYFDFNRFHCHFSPRDWQRLINNNWGFRPKRLSFKLFNIQVKEVTQNEGTKTIANNLTSTIQVFTDSEYQLPYVLGSAHQGCLPPFPADVFMIPQYGYLTLNNGSQAVGRSSFYCLEYFPSQMLRTGNNFQFTYTFEDVPFHSSYAHSQSLDRLMNPLIDQYLYYLSRTQTTGGTANTQTLGFSQGGPNTMANQAKNWLPGPCYRQQRVSTTTGQNNNSNFAWTAGTKYHLNGRNSLANPGIAMATHKDDEERFFPSNGILIFGKQNAARDNADYSDVMLTSEEEIKTTNPVATEEYGIVADNLQQQNTAPQIGTVNSQGALPGMVWQNRDVYLQGPIWAKIPHTDGNFHPSPLMGGFGLKHPPPQILIKNTPVPADPPTTFNQSKLNSFITQYSTGQVSVEIEWELQKENSKRWNPEIQYTSNYYKSTSVDFAVNTEGVYSEPRPIGTRYLTRNL

SEQ ID NO: 58 - protein, 738 aa, Adeno Associated Virus 8
MAADGYLPDWLEDNLSEGIREWWALKPGAPKPKANQQKQDDGRGLVLPGYKYLGPFNGLDKGEPVNAADAAALEHDKAYDQQLQAGDNPYLRYNHADAEFQERLQEDTSFGGNLGRAVFQAKKRVLEPLGLVEEGAKTAPGKKRPVEPSPQRSPDSSTGIGKKGQQPARKRLNFGQTGDSESVPDPQPLGEPPAAPSGVGPNTMAAGGGAPMADNNEGADGVGSSSGNWHCDSTWLGDRVITTSTRTWALPTYNNHLYKQISNGTSGGATNDNTYFGYSTPWGYFDFNRFHCHFSPRDWQRLINNNWGFRPKRLSFKLFNIQVKEVTQNEGTKTIANNLTSTIQVFTDSEYQLPYVLGSAHQGCLPPFPADVFMIPQYGYLTLNNGSQAVGRSSFYCLEYFPSQMLRTGNNFQFTYTFEDVPFHSSYAHSQSLDRLMNPLIDQYLYYLSRTQTTGGTANTQTLGFSQGGPNTMANQAKNWLPGPCYRQQRVSTTTGQNNNSNFAWAAGTKYHLNGRNSLANPGIAMATHKDDEERFFPSNGILIFGKQNAARDNADYSDVMLTSEEEIKTTNPVATEEYGIVADNLQQQNTAPQIGTVNSQGALPGMVWQNRDVYLQGPIWAKIPHTDGNFHPSPLMGGFGLKHPPPQILIKNTPVPADPPTTFNQSKLNSFITQYSTGQVSVEIEWELQKENSKRWNPEIQYTSNYYKSTSVDFAVNTEGVYSEPRPIGTRYLTRNL

SEQ ID NO: 59 - protein, 738 aa, Adeno Associated Virus 8
MAADGYLPDWLEDNLSEGIREWWALKPGAAAPKANQQKQDDGRGLVLPGYKYLGPFNGLDKGEPVNAADAAALEHDKAYDQQLQAGDNPYLRYNHADAEFQERLQEDTSFGGNLGRAVFQAKKRVLEPLGLVEEGAKTAPGKKRPVEPSPQRSPDSSTGIGKKGQQPARKRLNFGQTGDSESVPDPQPLGEPPAAPSGVGPNTMAAGGGAPMADNNEGADGVGSSSGNWHCDSTWLGDRVITTSTRTWALPTYNNHLYKQISNGTSGGATNDNTYFGYSTPWGYFDFNRFHCHFSPRDWQRLINNNWGFRPKRLSFKLFNIQVKEVTQNEGTKTIANNLTSTIQVFTDSEYQLPYVLGSAHQGCLPPFPADVFMIPQYGYLTLNNGSQAVGRSSFYCLEYFPSQMLRTGNNFQFTYTFEDVPFHSSYAHSQSLDRLMNPLIDQYLYYLSRTQTTGGTANTQTLGFSQGGPNTMANQAKNWLPGPCYRQQRVSTTTGQNNNSNFAWAAGTKYHLNGRNSLANPGIAMATHKDDEERFFPSNGILIFGKQNAARDNADYSDVMLTSEEEIKTTNPVATEEYGIVADNLQQQNTAPQIGTVNSQGALPGMVWQNRDVYLQGPIWAKIPHTDGNFHPSPLMGGFGLKHPPPQILIKNTPVPADPPTTFNQSKLNSFITQYSTGQVSVEIEWELQKENSKRWNPEIQYTSNYYKSTSVDFAVNTEGVYSEPRPIGTRYLTRNL

SEQ ID NO: 60 - protein, 720 aa, Adeno Associated Virus 8
MAADGYLPDWLEDNLSEGIREWWALKPGAPKPKANQQKQDDGRGLVLPGYKYLGPFNGLDKGEPVNAADAAALEHDKAYDQQLQAGDNPYLRYNHADAEFQERLQEDTSFGGNLGRAVFQAKKRVLEPLGLVEEGAKTAPGKKRPVEPSPQRSPDSSTGIGKKGQQPARKRLNFGQTGDSESVPDPQPLGEPPAAPSGVGPNTMAAGGGAPMADNNEGADGVGSSSGNWHCDSTWLGDRVITTSTRTWALPTYNNHLYKQISNGTSGGATNDNTYFGYSTPWGYFDFNRFHCHFSPRDWQRLINNNWGFRPKRLSFKLFNIQVKEVTQNEGTKTIANNLTSTIQVFTDSEYQLPYVLGSAHQGCLPPFPADVFMIPQYGYLTLNNGSQAVGRSSFYCLEYFPSQMLRTGNNFQFTYTFEDVPFHSSYAHSQSLDRLMNPLIDQYLYYLSRTQTTGGTANTQTLGFSQGGPNTMANQAKNWLPGPCYRQQRVSTTTGQNNNSNFAWAAGTKYHLNGRNSLANPGIAMATHKDDEERFFPSNGILIFGKQNAARDNADYSDVMLTSEEEIKTTNPVATEEYGIVADNLQQQNTAPQIGTVNSQGALPGMVWQNRDVYLQGPIWAKIPHTDGNFHPSPLMGGFGLKHPPPQILIKNTPVPADPPTTFNQSKLNSFITQYSTGQVSVEIEWELQKENSKRWNPEIQYTSNYYKSTSVDFAVNTE

SEQ ID NO: 61 - protein, 720 aa, Adeno Associated Virus 8
MAADGYLPDWLEDNLSEGIREWWALKPGAAAPKANQQKQDDGRGLVLPGYKYLGPFNGLDKGEPVNAADAAALEHDKAYDQQLQAGDNPYLRYNHADAEFQERLQEDTSFGGNLGRAVFQAKKRVLEPLGLVEEGAKTAPGKKRPVEPSPQRSPDSSTGIGKKGQQPARKRLNFGQTGDSESVPDPQPLGEPPAAPSGVGPNTMAAGGGAPMADNNEGADGVGSSSGNWHCDSTWLGDRVITTSTRTWALPTYNNHLYKQISNGTSGGATNDNTYFGYSTPWGYFDFNRFHCHFSPRDWQRLINNNWGFRPKRLSFKLFNIQVKEVTQNEGTKTIANNLTSTIQVFTDSEYQLPYVLGSAHQGCLPPFPADVFMIPQYGYLTLNNGSQAVGRSSFYCLEYFPSQMLRTGNNFQFTYTFEDVPFHSSYAHSQSLDRLMNPLIDQYLYYLSRTQTTGGTANTQTLGFSQGGPNTMANQAKNWLPGPCYRQQRVSTTTGQNNNSNFAWTAGTKYHLNGRNSLANPGIAMATHKDDEERFFPSNGILIFGKQNAARDNADYSDVMLTSEEEIKTTNPVATEEYGIVADNLQQQNTAPQIGTVNSQGALPGMVWQNRDVYLQGPIWAKIPHTDGNFHPSPLMGGFGLKHPPPQILIKNTPVPADPPTTFNQSKLNSFITQYSTGQVSVEIEWELQKENSKRWNPEIQYTSNYYKSTSVDFAVNTE

SEQ ID NO: 62 - protein, 720 aa, Adeno Associated Virus 8
MAADGYLPDWLEDNLSEGIREWWALKPAAPKPKANQQKQDDGRGLVLPGYKYLGPFNGLDKGEPVNAADAAALEHDKAYDQQLQAGDNPYLRYNHADAEFQERLQEDTSFGGNLGRAVFQAKKRVLEPLGLVEEGAKTAPGKKRPVEPSPQRSPDSSTGIGKKGQQPARKRLNFGQTGDSESVPDPQPLGEPPAAPSGVGPNTMAAGGGAPMADNNEGADGVGSSSGNWHCDSTWLGDRVITTSTRTWALPTYNNHLYKQISNGTSGGATNDNTYFGYSTPWGYFDFNRFHCHFSPRDWQRLINNNWGFRPKRLSFKLFNIQVKEVTQNEGTKTIANNLTSTIQVFTDSEYQLPYVLGSAHQGCLPPFPADVFMIPQYGYLTLNNGSQAVGRSSFYCLEYFPSQMLRTGNNFQFTYTFEDVPFHSSYAHSQSLDRLMNPLIDQYLYYLSRTQTTGGTANTQTLGFSQGGPNTMANQAKNWLPGPCYRQQRVSTTTGQNNNSNFAWTAGTKYHLNGRNSLANPGIAMATHKDDEERFFPSNGILIFGKQNAARDNADYSDVMLTSEEEIKTTNPVATEEYGIVADNLQQQNTAPQIGTVNSQGALPGMVWQNRDVYLQGPIWAKIPHTDGNFHPSPLMGGFGLKHPPPQILIKNTPVPADPPTTFNQSKLNSFITQYSTGQVSVEIEWELQKENSKRWNPEIQYTSNYYKSTSVDFAVNTE

SEQ ID NO: 63 - protein, 720 aa, Adeno Associated Virus 9
MAADGYLPDWLEDNLSEGIREWWALKPGAPQPKANQQHQDNARGLVLPGYKYLGPGNGLDKGEPVNAADAAALEHDKAYDQQLKAGDNPYLKYNHADAEFQERLKEDTSFGGNLGRAVFQAKKRLLEPLGLVEEAAKTAPGAARPVEQSPQEPDSSAGIGKSGAQPAKKRLNFGQTGDTESVPDPQPIGEPPAAPSGVGSLTMASGGGAPVADNNEGADGVGSSSGNWHCDSQWLGDRVITTSTRTWALPTYNNHLYKQISNSTSGGSSNDNAYFGYSTPWGYFDFNRFHCHFSPRDWQRLINNNWGFRPKRLNFKLFNIQVKEVTDNNGVKTIANNLTSTVQVFTDSDYQLPYVLGSAHEGCLPPFPADVFMIPQYGYLTLNDGSQAVGRSSFYCLEYFPSQMLRTGNNFQFSYEFENVPFHSSYAHSQSLDRLMNPLIDQYLYYLSKTINGSGQNQQTLKFSVAGPSNMAVQGRNYIPGPSYRQQRVSTTVTQNNNSEFAWPGASSWALNGRNSLMNPGPAMASHKEGEDRFFPLSGSLIFGKQGTGRDNVDADKVMITNEEEIKTTNPVATESYGQVATNHQSAQAQAQTGWVQNQGILPGMVWQDRDVYLQGPIWAKIPHTDGNFHPSPLMGGFGMKHPPPQILIKNTPVPADPPTAFNKDKLNSFITQYSTGQVSVEIEWELQKENSKRWNPEIQYTSNYYKSNNVEFAVNTEGV

SEQ ID NO: 64 - protein, 720 aa, Adeno Associated Virus 9
MAADGYLPDWLEDNLSEGIREWWALKPGAPQPKANQQHQDNARGLVLPGYKYLGPGNGLDKGEPVNAADAAALEHDKAYDQQLKAGDNPYLKYNHADAEFQERLKEDTSFGGNLGRAVFQAKKRLLEPLGLVEEAAKTAPGKKAAVEQSPQEPDSSAGIGKSGAQPAKKRLNFGQTGDTESVPDPQPIGEPPAAPSGVGSLTMASGGGAPVADNNEGADGVGSSSGNWHCDSQWLGDRVITTSTRTWALPTYNNHLYKQISNSTSGGSSNDNAYFGYSTPWGYFDFNRFHCHFSPRDWQRLINNNWGFRPKRLNFKLFNIQVKEVTDNNGVKTIANNLTSTVQVFTDSDYQLPYVLGSAHEGCLPPFPADVFMIPQYGYLTLNDGSQAVGRSSFYCLEYFPSQMLRTGNNFQFSYEFENVPFHSSYAHSQSLDRLMNPLIDQYLYYLSKTINGSGQNQQTLKFSVAGPSNMAVQGRNYIPGPSYRQQRVSTTVTQNNNSEFAWPGASSWALNGRNSLMNPGPAMASHKEGEDRFFPLSGSLIFGKQGTGRDNVDADKVMITNEEEIKTTNPVATESYGQVATNHQSAQAQAQTGWVQNQGILPGMVWQDRDVYLQGPIWAKIPHTDGNFHPSPLMGGFGMKHPPPQILIKNTPVPADPPTAFNKDKLNSFITQYSTGQVSVEIEWELQKENSKRWNPEIQYTSNYYKSNNVEFAVNTEGV

SEQ ID NO: 65 - protein, 720 aa, Adeno Associated Virus 9
MAADGYLPDWLEDNLSEGIREWWALKPGAPQPKANQQHQDNARGLVLPGYKYLGPGNGLDKGEPVNAADAAALEHDKAYDQQLKAGDNPYLKYNHADAEFQERLKEDTSFGGNLGRAVFQAAARLLEPLGLVEEAAKTAPGKKRPVEQSPQEPDSSAGIGKSGAQPAKKRLNFGQTGDTESVPDPQPIGEPPAAPSGVGSLTMASGGGAPVADNNEGADGVGSSSGNWHCDSQWLGDRVITTSTRTWALPTYNNHLYKQISNSTSGGSSNDNAYFGYSTPWGYFDFNRFHCHFSPRDWQRLINNNWGFRPKRLNFKLFNIQVKEVTDNNGVKTIANNLTSTVQVFTDSDYQLPYVLGSAHEGCLPPFPADVFMIPQYGYLTLNDGSQAVGRSSFYCLEYFPSQMLRTGNNFQFSYEFENVPFHSSYAHSQSLDRLMNPLIDQYLYYLSKTINGSGQNQQTLKFSVAGPSNMAVQGRNYIPGPSYRQQRVSTTVTQNNNSEFAWPGASSWALNGRNSLMNPGPAMASHKEGEDRFFPLSGSLIFGKQGTGRDNVDADKVMITNEEEIKTTNPVATESYGQVATNHQSAQAQAQTGWVQNQGILPGMVWQDRDVYLQGPIWAKIPHTDGNFHPSPLMGGFGMKHPPPQILIKNTPVPADPPTAFNKDKLNSFITQYSTGQVSVEIEWELQKENSKRWNPEIQYTSNYYKSNNVEFAVNTEGV

SEQ ID NO: 66 - protein, 720 aa, Adeno Associated Virus 9
MAADGYLPDWLEDNLSEGIREWWALKPGAPQPKANQQHQDNARGLVLPGYKYLGPGNGLDKGEPVNAADAAALEHDKAYDQQLKAGDNPYLKYNHADAEFQERLKEDTSFGGNLGRAVFQAKKRLLEPLGLVEEAAKTAPGKKRPVEQSPQEPDSSAGIGKSGAQPAAARLNFGQTGDTESVPDPQPIGEPPAAPSGVGSLTMASGGGAPVADNNEGADGVGSSSGNWHCDSQWLGDRVITTSTRTWALPTYNNHLYKQISNSTSGGSSNDNAYFGYSTPWGYFDFNRFHCHFSPRDWQRLINNNWGFRPKRLNFKLFNIQVKEVTDNNGVKTIANNLTSTVQVFTDSDYQLPYVLGSAHEGCLPPFPADVFMIPQYGYLTLNDGSQAVGRSSFYCLEYFPSQMLRTGNNFQFSYEFENVPFHSSYAHSQSLDRLMNPLIDQYLYYLSKTINGSGQNQQTLKFSVAGPSNMAVQGRNYIPGPSYRQQRVSTTVTQNNNSEFAWPGASSWALNGRNSLMNPGPAMASHKEGEDRFFPLSGSLIFGKQGTGRDNVDADKVMITNEEEIKTTNPVATESYGQVATNHQSAQAQAQTGWVQNQGILPGMVWQDRDVYLQGPIWAKIPHTDGNFHPSPLMGGFGMKHPPPQILIKNTPVPADPPTAFNKDKLNSFITQYSTGQVSVEIEWELQKENSKRWNPEIQYTSNYYKSNNVEFAVNTEGV

SEQ ID NO: 67 - protein, 720 aa, Adeno Associated Virus 9
MAADGYLPDAAEDNLSEGIREWWALKPGAPQPKANQQHQDNARGLVLPGYKYLGPGNGLDKGEPVNAADAAALEHDKAYDQQLKAGDNPYLKYNHADAEFQERLKEDTSFGGNLGRAVFQAKKRLLEPLGLVEEAAKTAPGKKRPVEQSPQEPDSSAGIGKSGAQPAKKRLNFGQTGDTESVPDPQPIGEPPAAPSGVGSLTMASGGGAPVADNNEGADGVGSSSGNWHCDSQWLGDRVITTSTRTWALPTYNNHLYKQISNSTSGGSSNDNAYFGYSTPWGYFDFNRFHCHFSPRDWQRLINNNWGFRPKRLNFKLFNIQVKEVTDNNGVKTIANNLTSTVQVFTDSDYQLPYVLGSAHEGCLPPFPADVFMIPQYGYLTLNDGSQAVGRSSFYCLEYFPSQMLRTGNNFQFSYEFENVPFHSSYAHSQSLDRLMNPLIDQYLYYLSKTINGSGQNQQTLKFSVAGPSNMAVQGRNYIPGPSYRQQRVSTTVTQNNNSEFAWPGASSWALNGRNSLMNPGPAMASHKEGEDRFFPLSGSLIFGKQGTGRDNVDADKVMITNEEEIKTTNPVATESYGQVATNHQSAQAQAQTGWVQNQGILPGMVWQDRDVYLQGPIWAKIPHTDGNFHPSPLMGGFGMKHPPPQILIKNTPVPADPPTAFNKDKLNSFITQYSTGQVSVEIEWELQKENSKRWNPEIQYTSNYYKSNNVEFAVNTEGV

SEQ ID NO: 68 - protein, 720 aa, Adeno Associated Virus 9
MAADGYLPDWLEDNLSEGIREWWALKPGAPQPKANQQHQDNARGLVLPGYKYLGPGNGLDKGEPVNAADAAALEHDKAYDQQLKAGDNPYLKYNHADAEFQERLKEDTSFGGNLGRAVFQAKKRLLEPLGLVEEAAKTAPGKKRPVEQSPQEPDSSAGIGKSGAQPAKKRLNFGQTGDTESVPDPQPIGEPPAAPSGVGSLTMASGGGAPVADNNEGADGVGSSSGNWHCDSQWLGDRVITTSTRTWALPTYNNHLYKQISNSTSGGSSNDNAYFGYSTPWGYFDFNRFHCHFSPRDWQRLINNNWGFRPKRLNFKLFNIQVKEVTDNNGVKTIANNAASTVQVFTDSDYQLPYVLGSAHEGCLPPFPADVFMIPQYGYLTLNDGSQAVGRSSFYCLEYFPSQMLRTGNNFQFSYEFENVPFHSSYAHSQSLDRLMNPLIDQYLYYLSKTINGSGQNQQTLKFSVAGPSNMAVQGRNYIPGPSYRQQRVSTTVTQNNNSEFAWPGASSWALNGRNSLMNPGPAMASHKEGEDRFFPLSGSLIFGKQGTGRDNVDADKVMITNEEEIKTTNPVATESYGQVATNHQSAQAQAQTGWVQNQGILPGMVWQDRDVYLQGPIWAKIPHTDGNFHPSPLMGGFGMKHPPPQILIKNTPVPADPPTAFNKDKLNSFITQYSTGQVSVEIEWELQKENSKRWNPEIQYTSNYYKSNNVEFAVNTEGV

SEQ ID NO: 69 - protein, 720 aa, Adeno Associated Virus 9
MAADGYLPDWLEDNLSEGIREWWALKPGAPQPKANQQHQDNARGLVLAAYKYLGPGNGLDKGEPVNAADAAALEHDKAYDQQLKAGDNPYLKYNHADAEFQERLKEDTSFGGNLGRAVFQAKKRLLEPLGLVEEAAKTAPGKKRPVEQSPQEPDSSAGIGKSGAQPAKKRLNFGQTGDTESVPDPQPIGEPPAAPSGVGSLTMASGGGAPVADNNEGADGVGSSSGNWHCDSQWLGDRVITTSTRTWALPTYNNHLYKQISNSTSGGSSNDNAYFGYSTPWGYFDFNRFHCHFSPRDWQRLINNNWGFRPKRLNFKLFNIQVKEVTDNNGVKTIANNLTSTVQVFTDSDYQLPYVLGSAHEGCLPPFPADVFMIPQYGYLTLNDGSQAVGRSSFYCLEYFPSQMLRTGNNFQFSYEFENVPFHSSYAHSQSLDRLMNPLIDQYLYYLSKTINGSGQNQQTLKFSVAGPSNMAVQGRNYIPGPSYRQQRVSTTVTQNNNSEFAWPGASSWALNGRNSLMNPGPAMASHKEGEDRFFPLSGSLIFGKQGTGRDNVDADKVMITNEEEIKTTNPVATESYGQVATNHQSAQAQAQTGWVQNQGILPGMVWQDRDVYLQGPIWAKIPHTDGNFHPSPLMGGFGMKHPPPQILIKNTPVPADPPTAFNKDKLNSFITQYSTGQVSVEIEWELQKENSKRWNPEIQYTSNYYKSNNVEFAVNTEGV

SEQ ID NO: 70 - protein, 720 aa, Adeno Associated Virus 9
MAADGYLPDWLEDNLSEGIREWWALKPGAPQPKANQQHQDNARGLVLPGYKYLGPGNGLDKGEPVNAAAAAALEHDKAYDQQLKAGDNPYLKYNHADAEFQERLKEDTSFGGNLGRAVFQAKKRLLEPLGLVEEAAKTAPGKKRPVEQSPQEPDSSAGIGKSGAQPAKKRLNFGQTGDTESVPDPQPIGEPPAAPSGVGSLTMASGGGAPVADNNEGADGVGSSSGNWHCDSQWLGDRVITTSTRTWALPTYNNHLYKQISNSTSGGSSNDNAYFGYSTPWGYFDFNRFHCHFSPRDWQRLINNNWGFRPKRLNFKLFNIQVKEVTDNNGVKTIANNLTSTVQVFTDSDYQLPYVLGSAHEGCLPPFPADVFMIPQYGYLTLNDGSQAVGRSSFYCLEYFPSQMLRTGNNFQFSYEFENVPFHSSYAHSQSLDRLMNPLIDQYLYYLSKTINGSGQNQQTLKFSVAGPSNMAVQGRNYIPGPSYRQQRVSTTVTQNNNSEFAWPGASSWALNGRNSLMNPGPAMASHKEGEDRFFPLSGSLIFGKQGTGRDNVDADKVMITNEEEIKTTNPVATESYGQVATNHQSAQAQAQTGWVQNQGILPGMVWQDRDVYLQGPIWAKIPHTDGNFHPSPLMGGFGMKHPPPQILIKNTPVPADPPTAFNKDKLNSFITQYSTGQVSVEIEWELQKENSKRWNPEIQYTSNYYKSNNVEFAVNTEGV

SEQ ID NO: 71 - protein, 720 aa, Adeno Associated Virus 9
MAADGYLPDWLEDNLSEGIREWWALKPGAPQPKANQQHQDNARGLVLPGYKYLGPGNGLDKGEPVNAADAAALEHAAAYDQQLKAGDNPYLKYNHADAEFQERLKEDTSFGGNLGRAVFQAKKRLLEPLGLVEEAAKTAPGKKRPVEQSPQEPDSSAGIGKSGAQPAKKRLNFGQTGDTESVPDPQPIGEPPAAPSGVGSLTMASGGGAPVADNNEGADGVGSSSGNWHCDSQWLGDRVITTSTRTWALPTYNNHLYKQISNSTSGGSSNDNAYFGYSTPWGYFDFNRFHCHFSPRDWQRLINNNWGFRPKRLNFKLFNIQVKEVTDNNGVKTIANNLTSTVQVFTDSDYQLPYVLGSAHEGCLPPFPADVFMIPQYGYLTLNDGSQAVGRSSFYCLEYFPSQMLRTGNNFQFSYEFENVPFHSSYAHSQSLDRLMNPLIDQYLYYLSKTINGSGQNQQTLKFSVAGPSNMAVQGRNYIPGPSYRQQRVSTTVTQNNNSEFAWPGASSWALNGRNSLMNPGPAMASHKEGEDRFFPLSGSLIFGKQGTGRDNVDADKVMITNEEEIKTTNPVATESYGQVATNHQSAQAQAQTGWVQNQGILPGMVWQDRDVYLQGPIWAKIPHTDGNFHPSPLMGGFGMKHPPPQILIKNTPVPADPPTAFNKDKLNSFITQYSTGQVSVEIEWELQKENSKRWNPEIQYTSNYYKSNNVEFAVNTEGV

SEQ ID NO: 72 - protein, 720 aa, Adeno Associated Virus 9
MAADGYLPDWLEDNLSEGIREWWALKPGAPQPKANQQHQDNARGLVLPGYKYLGPGNGLDKGEPVNAADAAALEHDKAYDQQLKAGDNPYLKYNHADAEFQERLKEDTSFGGNLGRAVFQAKKRLLEPLGLVEEAAKTAPGKKRPVEQSPQEPDSSAGIGKSGAQPAKKRLNFGQTGDTESVPDPQPIGEPPAAPSGVGSLTMASGGGAPVADNNEGADGVAASSGNWHCDSQWLGDRVITTSTRTWALPTYNNHLYKQISNSTSGGSSNDNAYFGYSTPWGYFDFNRFHCHFSPRDWQRLINNNWGFRPKRLNFKLFNIQVKEVTDNNGVKTIANNLTSTVQVFTDSDYQLPYVLGSAHEGCLPPFPADVFMIPQYGYLTLNDGSQAVGRSSFYCLEYFPSQMLRTGNNFQFSYEFENVPFHSSYAHSQSLDRLMNPLIDQYLYYLSKTINGSGQNQQTLKFSVAGPSNMAVQGRNYIPGPSYRQQRVSTTVTQNNNSEFAWPGASSWALNGRNSLMNPGPAMASHKEGEDRFFPLSGSLIFGKQGTGRDNVDADKVMITNEEEIKTTNPVATESYGQVATNHQSAQAQAQTGWVQNQGILPGMVWQDRDVYLQGPIWAKIPHTDGNFHPSPLMGGFGMKHPPPQILIKNTPVPADPPTAFNKDKLNSFITQYSTGQVSVEIEWELQKENSKRWNPEIQYTSNYYKSNNVEFAVNTEGV

SEQ ID NO: 73 - protein, 720 aa, Adeno Associated Virus 9
MAADGYLPDWLEDNLSEGIREWWALKPGAPQPKANQQHQDNARGLVLPGAAYLGPGNGLDKGEPVNAADAAALEHDKAYDQQLKAGDNPYLKYNHADAEFQERLKEDTSFGGNLGRAVFQAKKRLLEPLGLVEEAAKTAPGKKRPVEQSPQEPDSSAGIGKSGAQPAKKRLNFGQTGDTESVPDPQPIGEPPAAPSGVGSLTMASGGGAPVADNNEGADGVGSSSGNWHCDSQWLGDRVITTSTRTWALPTYNNHLYKQISNSTSGGSSNDNAYFGYSTPWGYFDFNRFHCHFSPRDWQRLINNNWGFRPKRLNFKLFNIQVKEVTDNNGVKTIANNLTSTVQVFTDSDYQLPYVLGSAHEGCLPPFPADVFMIPQYGYLTLNDGSQAVGRSSFYCLEYFPSQMLRTGNNFQFSYEFENVPFHSSYAHSQSLDRLMNPLIDQYLYYLSKTINGSGQNQQTLKFSVAGPSNMAVQGRNYIPGPSYRQQRVSTTVTQNNNSEFAWPGASSWALNGRNSLMNPGPAMASHKEGEDRFFPLSGSLIFGKQGTGRDNVDADKVMITNEEEIKTTNPVATESYGQVATNHQSAQAQAQTGWVQNQGILPGMVWQDRDVYLQGPIWAKIPHTDGNFHPSPLMGGFGMKHPPPQILIKNTPVPADPPTAFNKDKLNSFITQYSTGQVSVEIEWELQKENSKRWNPEIQYTSNYYKSNNVEFAVNTEGV

SEQ ID NO: 74 - protein, 720 aa, Adeno Associated Virus 9
MAADGYLPDWLEDNLSEGIREWWALKPGAPQPKANQQHQDNARGLVLPGYKYLAAGNGLDKGEPVNAADAAALEHDKAYDQQLKAGDNPYLKYNHADAEFQERLKEDTSFGGNLGRAVFQAKKRLLEPLGLVEEAAKTAPGKKRPVEQSPQEPDSSAGIGKSGAQPAKKRLNFGQTGDTESVPDPQPIGEPPAAPSGVGSLTMASGGGAPVADNNEGADGVGSSSGNWHCDSQWLGDRVITTSTRTWALPTYNNHLYKQISNSTSGGSSNDNAYFGYSTPWGYFDFNRFHCHFSPRDWQRLINNNWGFRPKRLNFKLFNIQVKEVTDNNGVKTIANNLTSTVQVFTDSDYQLPYVLGSAHEGCLPPFPADVFMIPQYGYLTLNDGSQAVGRSSFYCLEYFPSQMLRTGNNFQFSYEFENVPFHSSYAHSQSLDRLMNPLIDQYLYYLSKTINGSGQNQQTLKFSVAGPSNMAVQGRNYIPGPSYRQQRVSTTVTQNNNSEFAWPGASSWALNGRNSLMNPGPAMASHKEGEDRFFPLSGSLIFGKQGTGRDNVDADKVMITNEEEIKTTNPVATESYGQVATNHQSAQAQAQTGWVQNQGILPGMVWQDRDVYLQGPIWAKIPHTDGNFHPSPLMGGFGMKHPPPQILIKNTPVPADPPTAFNKDKLNSFITQYSTGQVSVEIEWELQKENSKRWNPEIQYTSNYYKSNNVEFAVNTEGV

SEQ ID NO: 75 - protein, 720 aa, Adeno Associated Virus 9
MAADGYLPDWLEDNLSEGIREWWALKPGAPQPKANQQHQDNARGLVLPGYKYLGPAAGLDKGEPVNAADAAALEHDKAYDQQLKAGDNPYLKYNHADAEFQERLKEDTSFGGNLGRAVFQAKKRLLEPLGLVEEAAKTAPGKKRPVEQSPQEPDSSAGIGKSGAQPAKKRLNFGQTGDTESVPDPQPIGEPPAAPSGVGSLTMASGGGAPVADNNEGADGVGSSSGNWHCDSQWLGDRVITTSTRTWALPTYNNHLYKQISNSTSGGSSNDNAYFGYSTPWGYFDFNRFHCHFSPRDWQRLINNNWGFRPKRLNFKLFNIQVKEVTDNNGVKTIANNLTSTVQVFTDSDYQLPYVLGSAHEGCLPPFPADVFMIPQYGYLTLNDGSQAVGRSSFYCLEYFPSQMLRTGNNFQFSYEFENVPFHSSYAHSQSLDRLMNPLIDQYLYYLSKTINGSGQNQQTLKFSVAGPSNMAVQGRNYIPGPSYRQQRVSTTVTQNNNSEFAWPGASSWALNGRNSLMNPGPAMASHKEGEDRFFPLSGSLIFGKQGTGRDNVDADKVMITNEEEIKTTNPVATESYGQVATNHQSAQAQAQTGWVQNQGILPGMVWQDRDVYLQGPIWAKIPHTDGNFHPSPLMGGFGMKHPPPQILIKNTPVPADPPTAFNKDKLNSFITQYSTGQVSVEIEWELQKENSKRWNPEIQYTSNYYKSNNVEFAVNTEGV

SEQ ID NO: 76 - protein, 720 aa, Adeno Associated Virus 9
MAADGYLPDWLEDNLSEGIREWWALKPGAPQPKANQQHQDNARGLVLPGYKYLGPGNGLDKGEPVNAADAAALAADKAYDQQLKAGDNPYLKYNHADAEFQERLKEDTSFGGNLGRAVFQAKKRLLEPLGLVEEAAKTAPGKKRPVEQSPQEPDSSAGIGKSGAQPAKKRLNFGQTGDTESVPDPQPIGEPPAAPSGVGSLTMASGGGAPVADNNEGADGVGSSSGNWHCDSQWLGDRVITTSTRTWALPTYNNHLYKQISNSTSGGSSNDNAYFGYSTPWGYFDFNRFHCHFSPRDWQRLINNNWGFRPKRLNFKLFNIQVKEVTDNNGVKTIANNLTSTVQVFTDSDYQLPYVLGSAHEGCLPPFPADVFMIPQYGYLTLNDGSQAVGRSSFYCLEYFPSQMLRTGNNFQFSYEFENVPFHSSYAHSQSLDRLMNPLIDQYLYYLSKTINGSGQNQQTLKFSVAGPSNMAVQGRNYIPGPSYRQQRVSTTVTQNNNSEFAWPGASSWALNGRNSLMNPGPAMASHKEGEDRFFPLSGSLIFGKQGTGRDNVDADKVMITNEEEIKTTNPVATESYGQVATNHQSAQAQAQTGWVQNQGILPGMVWQDRDVYLQGPIWAKIPHTDGNFHPSPLMGGFGMKHPPPQILIKNTPVPADPPTAFNKDKLNSFITQYSTGQVSVEIEWELQKENSKRWNPEIQYTSNYYKSNNVEFAVNTEGV

SEQ ID NO: 77 - protein, 720 aa, Adeno Associated Virus 9
MAADGYLPDWLEDNLSEGIREWWALKPGAPQPKANQQHQDNARGLVLPGYKYLGPGNGLDKGEPVNAADAAALEHDKAADQQLKAGDNPYLKYNHADAEFQERLKEDTSFGGNLGRAVFQAKKRLLEPLGLVEEAAKTAPGKKRPVEQSPQEPDSSAGIGKSGAQPAKKRLNFGQTGDTESVPDPQPIGEPPAAPSGVGSLTMASGGGAPVADNNEGADGVGSSSGNWHCDSQWLGDRVITTSTRTWALPTYNNHLYKQISNSTSGGSSNDNAYFGYSTPWGYFDFNRFHCHFSPRDWQRLINNNWGFRPKRLNFKLFNIQVKEVTDNNGVKTIANNLTSTVQVFTDSDYQLPYVLGSAHEGCLPPFPADVFMIPQYGYLTLNDGSQAVGRSSFYCLEYFPSQMLRTGNNFQFSYEFENVPFHSSYAHSQSLDRLMNPLIDQYLYYLSKTINGSGQNQQTLKFSVAGPSNMAVQGRNYIPGPSYRQQRVSTTVTQNNNSEFAWPGASSWALNGRNSLMNPGPAMASHKEGEDRFFPLSGSLIFGKQGTGRDNVDADKVMITNEEEIKTTNPVATESYGQVATNHQSAQAQAQTGWVQNQGILPGMVWQDRDVYLQGPIWAKIPHTDGNFHPSPLMGGFGMKHPPPQILIKNTPVPADPPTAFNKDKLNSFITQYSTGQVSVEIEWELQKENSKRWNPEIQYTSNYYKSNNVEFAVNTEGV

SEQ ID NO: 78 - protein, 720 aa, Adeno Associated Virus 9
MAADGYLPDWLEDNLSEGIREWWALKPGAPQPKANQQHQDNARGLVLPGYKYLGPGNGLDKGEPVNAADAAALEHDKAYDQQLKAGDNPYLKYNHAAAEFQERLKEDTSFGGNLGRAVFQAKKRLLEPLGLVEEAAKTAPGKKRPVEQSPQEPDSSAGIGKSGAQPAKKRLNFGQTGDTESVPDPQPIGEPPAAPSGVGSLTMASGGGAPVADNNEGADGVGSSSGNWHCDSQWLGDRVITTSTRTWALPTYNNHLYKQISNSTSGGSSNDNAYFGYSTPWGYFDFNRFHCHFSPRDWQRLINNNWGFRPKRLNFKLFNIQVKEVTDNNGVKTIANNLTSTVQVFTDSDYQLPYVLGSAHEGCLPPFPADVFMIPQYGYLTLNDGSQAVGRSSFYCLEYFPSQMLRTGNNFQFSYEFENVPFHSSYAHSQSLDRLMNPLIDQYLYYLSKTINGSGQNQQTLKFSVAGPSNMAVQGRNYIPGPSYRQQRVSTTVTQNNNSEFAWPGASSWALNGRNSLMNPGPAMASHKEGEDRFFPLSGSLIFGKQGTGRDNVDADKVMITNEEEIKTTNPVATESYGQVATNHQSAQAQAQTGWVQNQGILPGMVWQDRDVYLQGPIWAKIPHTDGNFHPSPLMGGFGMKHPPPQILIKNTPVPADPPTAFNKDKLNSFITQYSTGQVSVEIEWELQKENSKRWNPEIQYTSNYYKSNNVEFAVNTEGV

SEQ ID NO: 79 - protein, 720 aa, Adeno Associated Virus 9
MAADGYLPDWLEDNLSEGIREWWALKPGAPQPKANQQHQDNARGLVLPGYKYLGPGNGLDKGEPVNAADAAALEHDKAYDQQLKAGDNPYLKYNHADAEFQERLKEDTSFGGNLGRAVFQAKKRLLEPLGLVEEAAKTAPGKKRPVEQSPQEPDSSAGIGKSGAQPAKKRLNFGQTGDTESVPDPQPIGEPPAAPSGVGSLTMASGGGAPVADNNEGADGVGSSSGNWHCDSQWLGDRVITTSTRTWALPTYNNHLYKQISAATSGGSSNDNAYFGYSTPWGYFDFNRFHCHFSPRDWQRLINNNWGFRPKRLNFKLFNIQVKEVTDNNGVKTIANNLTSTVQVFTDSDYQLPYVLGSAHEGCLPPFPADVFMIPQYGYLTLNDGSQAVGRSSFYCLEYFPSQMLRTGNNFQFSYEFENVPFHSSYAHSQSLDRLMNPLIDQYLYYLSKTINGSGQNQQTLKFSVAGPSNMAVQGRNYIPGPSYRQQRVSTTVTQNNNSEFAWPGASSWALNGRNSLMNPGPAMASHKEGEDRFFPLSGSLIFGKQGTGRDNVDADKVMITNEEEIKTTNPVATESYGQVATNHQSAQAQAQTGWVQNQGILPGMVWQDRDVYLQGPIWAKIPHTDGNFHPSPLMGGFGMKHPPPQILIKNTPVPADPPTAFNKDKLNSFITQYSTGQVSVEIEWELQKENSKRWNPEIQYTSNYYKSNNVEFAVNTEGV

SEQ ID NO: 80 - protein, 720 aa, Adeno Associated Virus 9
MAADGYLPDWLEDNLSEGIREWWALKPGAPQPKANQQHQDNARGLVLPGYKYLGPGNGLDKGEPVNAADAAALEHDKAYDQQLKAGDNPYLKYNHADAEFQERLKEDTSFGGNLGRAVFQAKKRLLEPLGLVEEAAKTAPGKKRPVEQSPQEPDSSAGIGKSGAQPAKKRLNFGQTGDTESVPDPQPIGEPPAAPSGVGSLTMASGGGAPVADNNEGADGVGSSSGNWHCDSQWLGDRVITTSTRTWALPTYNNHLYKQISNSAAGGSSNDNAYFGYSTPWGYFDFNRFHCHFSPRDWQRLINNNWGFRPKRLNFKLFNIQVKEVTDNNGVKTIANNLTSTVQVFTDSDYQLPYVLGSAHEGCLPPFPADVFMIPQYGYLTLNDGSQAVGRSSFYCLEYFPSQMLRTGNNFQFSYEFENVPFHSSYAHSQSLDRLMNPLIDQYLYYLSKTINGSGQNQQTLKFSVAGPSNMAVQGRNYIPGPSYRQQRVSTTVTQNNNSEFAWPGASSWALNGRNSLMNPGPAMASHKEGEDRFFPLSGSLIFGKQGTGRDNVDADKVMITNEEEIKTTNPVATESYGQVATNHQSAQAQAQTGWVQNQGILPGMVWQDRDVYLQGPIWAKIPHTDGNFHPSPLMGGFGMKHPPPQILIKNTPVPADPPTAFNKDKLNSFITQYSTGQVSVEIEWELQKENSKRWNPEIQYTSNYYKSNNVEFAVNTEGV

SEQ ID NO: 81 - protein, 720 aa, Adeno Associated Virus 9
MAADGYLPDWLEDNLSEGIREWWALKPGAPQPKANQQHQDNARGLVLPGYKYLGPGNGLDKGEPVNAADAAALEHDKAYDQQLKAGDNPYLKYNHADAEFQERLKEDTSFGGNLGRAVFQAKKRLLEPLGLVEEAAKTAPGKKRPVEQSPQEPDSSAGIGKSGAQPAKKRLNFGQTGDTESVPDPQPIGEPPAAPSGVGSLTMASGGGAPVADNNEGADGVGSSSGNWHCDSQWLGDRVITTSTRTWALPTYNNHLYKQISNSTSAASSNDNAYFGYSTPWGYFDFNRFHCHFSPRDWQRLINNNWGFRPKRLNFKLFNIQVKEVTDNNGVKTIANNLTSTVQVFTDSDYQLPYVLGSAHEGCLPPFPADVFMIPQYGYLTLNDGSQAVGRSSFYCLEYFPSQMLRTGNNFQFSYEFENVPFHSSYAHSQSLDRLMNPLIDQYLYYLSKTINGSGQNQQTLKFSVAGPSNMAVQGRNYIPGPSYRQQRVSTTVTQNNNSEFAWPGASSWALNGRNSLMNPGPAMASHKEGEDRFFPLSGSLIFGKQGTGRDNVDADKVMITNEEEIKTTNPVATESYGQVATNHQSAQAQAQTGWVQNQGILPGMVWQDRDVYLQGPIWAKIPHTDGNFHPSPLMGGFGMKHPPPQILIKNTPVPADPPTAFNKDKLNSFITQYSTGQVSVEIEWELQKENSKRWNPEIQYTSNYYKSNNVEFAVNTEGV

SEQ ID NO: 82 - protein, 720 aa, Adeno Associated Virus 9
MAADGYLPDWLEDNLSEGIREWWALKPGAPQPKANQQHQDNARGLVLPGYKYLGPGNGLDKGEPVNAADAAALEHDKAYDQQLKAGDNPAAKYNHADAEFQERLKEDTSFGGNLGRAVFQAKKRLLEPLGLVEEAAKTAPGKKRPVEQSPQEPDSSAGIGKSGAQPAKKRLNFGQTGDTESVPDPQPIGEPPAAPSGVGSLTMASGGGAPVADNNEGADGVGSSSGNWHCDSQWLGDRVITTSTRTWALPTYNNHLYKQISNSTSGGSSNDNAYFGYSTPWGYFDFNRFHCHFSPRDWQRLINNNWGFRPKRLNFKLFNIQVKEVTDNNGVKTIANNLTSTVQVFTDSDYQLPYVLGSAHEGCLPPFPADVFMIPQYGYLTLNDGSQAVGRSSFYCLEYFPSQMLRTGNNFQFSYEFENVPFHSSYAHSQSLDRLMNPLIDQYLYYLSKTINGSGQNQQTLKFSVAGPSNMAVQGRNYIPGPSYRQQRVSTTVTQNNNSEFAWPGASSWALNGRNSLMNPGPAMASHKEGEDRFFPLSGSLIFGKQGTGRDNVDADKVMITNEEEIKTTNPVATESYGQVATNHQSAQAQAQTGWVQNQGILPGMVWQDRDVYLQGPIWAKIPHTDGNFHPSPLMGGFGMKHPPPQILIKNTPVPADPPTAFNKDKLNSFITQYSTGQVSVEIEWELQKENSKRWNPEIQYTSNYYKSNNVEFAVNTEGV

SEQ ID NO: 83 - protein, 720 aa, Adeno Associated Virus 9
MAADGYLPDWLEDNLSEGIREWWALKPGAPQPKANQQHQDNARGLAAPGYKYLGPGNGLDKGEPVNAADAAALEHDKAYDQQLKAGDNPYLKYNHADAEFQERLKEDTSFGGNLGRAVFQAKKRLLEPLGLVEEAAKTAPGKKRPVEQSPQEPDSSAGIGKSGAQPAKKRLNFGQTGDTESVPDPQPIGEPPAAPSGVGSLTMASGGGAPVADNNEGADGVGSSSGNWHCDSQWLGDRVITTSTRTWALPTYNNHLYKQISNSTSGGSSNDNAYFGYSTPWGYFDFNRFHCHFSPRDWQRLINNNWGFRPKRLNFKLFNIQVKEVTDNNGVKTIANNLTSTVQVFTDSDYQLPYVLGSAHEGCLPPFPADVFMIPQYGYLTLNDGSQAVGRSSFYCLEYFPSQMLRTGNNFQFSYEFENVPFHSSYAHSQSLDRLMNPLIDQYLYYLSKTINGSGQNQQTLKFSVAGPSNMAVQGRNYIPGPSYRQQRVSTTVTQNNNSEFAWPGASSWALNGRNSLMNPGPAMASHKEGEDRFFPLSGSLIFGKQGTGRDNVDADKVMITNEEEIKTTNPVATESYGQVATNHQSAQAQAQTGWVQNQGILPGMVWQDRDVYLQGPIWAKIPHTDGNFHPSPLMGGFGMKHPPPQILIKNTPVPADPPTAFNKDKLNSFITQYSTGQVSVEIEWELQKENSKRWNPEIQYTSNYYKSNNVEFAVNTEGV

SEQ ID NO: 84 - protein, 720 aa, Adeno Associated Virus 9
MAADGYLPDWLEDNLSEGIREWWALKPGAPQPKANQQHQDNARGLVLPGYKAAGPGNGLDKGEPVNAADAAALEHDKAYDQQLKAGDNPYLKYNHADAEFQERLKEDTSFGGNLGRAVFQAKKRLLEPLGLVEEAAKTAPGKKRPVEQSPQEPDSSAGIGKSGAQPAKKRLNFGQTGDTESVPDPQPIGEPPAAPSGVGSLTMASGGGAPVADNNEGADGVGSSSGNWHCDSQWLGDRVITTSTRTWALPTYNNHLYKQISNSTSGGSSNDNAYFGYSTPWGYFDFNRFHCHFSPRDWQRLINNNWGFRPKRLNFKLFNIQVKEVTDNNGVKTIANNLTSTVQVFTDSDYQLPYVLGSAHEGCLPPFPADVFMIPQYGYLTLNDGSQAVGRSSFYCLEYFPSQMLRTGNNFQFSYEFENVPFHSSYAHSQSLDRLMNPLIDQYLYYLSKTINGSGQNQQTLKFSVAGPSNMAVQGRNYIPGPSYRQQRVSTTVTQNNNSEFAWPGASSWALNGRNSLMNPGPAMASHKEGEDRFFPLSGSLIFGKQGTGRDNVDADKVMITNEEEIKTTNPVATESYGQVATNHQSAQAQAQTGWVQNQGILPGMVWQDRDVYLQGPIWAKIPHTDGNFHPSPLMGGFGMKHPPPQILIKNTPVPADPPTAFNKDKLNSFITQYSTGQVSVEIEWELQKENSKRWNPEIQYTSNYYKSNNVEFAVNTEGV

SEQ ID NO: 85 - protein, 720 aa, Adeno Associated Virus 9
MAADGYLPDWLEDNLSEGIREWWALKPGAPQPKANQQHQDNARGLVLPGYKYLGPGNGLDKGEPVNAADAAALEHDKAYDQQLKAGDNPYLAANHADAEFQERLKEDTSFGGNLGRAVFQAKKRLLEPLGLVEEAAKTAPGKKRPVEQSPQEPDSSAGIGKSGAQPAKKRLNFGQTGDTESVPDPQPIGEPPAAPSGVGSLTMASGGGAPVADNNEGADGVGSSSGNWHCDSQWLGDRVITTSTRTWALPTYNNHLYKQISNSTSGGSSNDNAYFGYSTPWGYFDFNRFHCHFSPRDWQRLINNNWGFRPKRLNFKLFNIQVKEVTDNNGVKTIANNLTSTVQVFTDSDYQLPYVLGSAHEGCLPPFPADVFMIPQYGYLTLNDGSQAVGRSSFYCLEYFPSQMLRTGNNFQFSYEFENVPFHSSYAHSQSLDRLMNPLIDQYLYYLSKTINGSGQNQQTLKFSVAGPSNMAVQGRNYIPGPSYRQQRVSTTVTQNNNSEFAWPGASSWALNGRNSLMNPGPAMASHKEGEDRFFPLSGSLIFGKQGTGRDNVDADKVMITNEEEIKTTNPVATESYGQVATNHQSAQAQAQTGWVQNQGILPGMVWQDRDVYLQGPIWAKIPHTDGNFHPSPLMGGFGMKHPPPQILIKNTPVPADPPTAFNKDKLNSFITQYSTGQVSVEIEWELQKENSKRWNPEIQYTSNYYKSNNVEFAVNTEGV

SEQ ID NO: 86 - protein, 720 aa, Adeno Associated Virus 9
MAADGYLPDWLEDNLSEGIREWWALKPGAPQPKANQQHQDNARGLVLPGYKYLGPGNGLDKGEPVNAADAAALEHDKAYDQQLKAGDNPYLKYNHADAEAAERLKEDTSFGGNLGRAVFQAKKRLLEPLGLVEEAAKTAPGKKRPVEQSPQEPDSSAGIGKSGAQPAKKRLNFGQTGDTESVPDPQPIGEPPAAPSGVGSLTMASGGGAPVADNNEGADGVGSSSGNWHCDSQWLGDRVITTSTRTWALPTYNNHLYKQISNSTSGGSSNDNAYFGYSTPWGYFDFNRFHCHFSPRDWQRLINNNWGFRPKRLNFKLFNIQVKEVTDNNGVKTIANNLTSTVQVFTDSDYQLPYVLGSAHEGCLPPFPADVFMIPQYGYLTLNDGSQAVGRSSFYCLEYFPSQMLRTGNNFQFSYEFENVPFHSSYAHSQSLDRLMNPLIDQYLYYLSKTINGSGQNQQTLKFSVAGPSNMAVQGRNYIPGPSYRQQRVSTTVTQNNNSEFAWPGASSWALNGRNSLMNPGPAMASHKEGEDRFFPLSGSLIFGKQGTGRDNVDADKVMITNEEEIKTTNPVATESYGQVATNHQSAQAQAQTGWVQNQGILPGMVWQDRDVYLQGPIWAKIPHTDGNFHPSPLMGGFGMKHPPPQILIKNTPVPADPPTAFNKDKLNSFITQYSTGQVSVEIEWELQKENSKRWNPEIQYTSNYYKSNNVEFAVNTEGV

SEQ ID NO: 87 - protein, 720 aa, Adeno Associated Virus 9
MAADGYLPDWLEDNLSEGIREWWALKPGAPQPKANQQHQDNARGLVLPGYKYLGPGNGLDKGEPVNAADAAALEHDKAYDQQLKAGDNPYLKYNHADAEFQERLKEDTSFGGNLGRAVFQAKKRLLEPLGLVEEAAKTAPGKKRPVEQSPQEPDSSAGIGKSGAQPAKKRLNFGQTGDTESVPDPQPIGEPPAAPSGVGSLTMASGGGAPVADNNEGADGVGSSSGNWHCDSQWLGDRVITTSTRTWALPTYNNHLYKQISNSTSGGSSAANAYFGYSTPWGYFDFNRFHCHFSPRDWQRLINNNWGFRPKRLNFKLFNIQVKEVTDNNGVKTIANNLTSTVQVFTDSDYQLPYVLGSAHEGCLPPFPADVFMIPQYGYLTLNDGSQAVGRSSFYCLEYFPSQMLRTGNNFQFSYEFENVPFHSSYAHSQSLDRLMNPLIDQYLYYLSKTINGSGQNQQTLKFSVAGPSNMAVQGRNYIPGPSYRQQRVSTTVTQNNNSEFAWPGASSWALNGRNSLMNPGPAMASHKEGEDRFFPLSGSLIFGKQGTGRDNVDADKVMITNEEEIKTTNPVATESYGQVATNHQSAQAQAQTGWVQNQGILPGMVWQDRDVYLQGPIWAKIPHTDGNFHPSPLMGGFGMKHPPPQILIKNTPVPADPPTAFNKDKLNSFITQYSTGQVSVEIEWELQKENSKRWNPEIQYTSNYYKSNNVEFAVNTEGV

SEQ ID NO: 88 - protein, 720 aa, Adeno Associated Virus 9
MAADGYLPDWLEDNLSEGIREAAALKPGAPQPKANQQHQDNARGLVLPGYKYLGPGNGLDKGEPVNAADAAALEHDKAYDQQLKAGDNPYLKYNHADAEFQERLKEDTSFGGNLGRAVFQAKKRLLEPLGLVEEAAKTAPGKKRPVEQSPQEPDSSAGIGKSGAQPAKKRLNFGQTGDTESVPDPQPIGEPPAAPSGVGSLTMASGGGAPVADNNEGADGVGSSSGNWHCDSQWLGDRVITTSTRTWALPTYNNHLYKQISNSTSGGSSNDNAYFGYSTPWGYFDFNRFHCHFSPRDWQRLINNNWGFRPKRLNFKLFNIQVKEVTDNNGVKTIANNLTSTVQVFTDSDYQLPYVLGSAHEGCLPPFPADVFMIPQYGYLTLNDGSQAVGRSSFYCLEYFPSQMLRTGNNFQFSYEFENVPFHSSYAHSQSLDRLMNPLIDQYLYYLSKTINGSGQNQQTLKFSVAGPSNMAVQGRNYIPGPSYRQQRVSTTVTQNNNSEFAWPGASSWALNGRNSLMNPGPAMASHKEGEDRFFPLSGSLIFGKQGTGRDNVDADKVMITNEEEIKTTNPVATESYGQVATNHQSAQAQAQTGWVQNQGILPGMVWQDRDVYLQGPIWAKIPHTDGNFHPSPLMGGFGMKHPPPQILIKNTPVPADPPTAFNKDKLNSFITQYSTGQVSVEIEWELQKENSKRWNPEIQYTSNYYKSNNVEFAVNTEGV

SEQ ID NO: 89 - protein, 720 aa, Adeno Associated Virus 9
MAADGYLPDWLEDNLSEGIREWWALKPGAPQPKANQQHQDNARGLVLPGYKYLGPGNGLDKGEPVNAADAAALEHDKAYDQQLKAGDNPYLKYNHADAEFQERLKEDTSFGGNLGRAAAQAKKRLLEPLGLVEEAAKTAPGKKRPVEQSPQEPDSSAGIGKSGAQPAKKRLNFGQTGDTESVPDPQPIGEPPAAPSGVGSLTMASGGGAPVADNNEGADGVGSSSGNWHCDSQWLGDRVITTSTRTWALPTYNNHLYKQISNSTSGGSSNDNAYFGYSTPWGYFDFNRFHCHFSPRDWQRLINNNWGFRPKRLNFKLFNIQVKEVTDNNGVKTIANNLTSTVQVFTDSDYQLPYVLGSAHEGCLPPFPADVFMIPQYGYLTLNDGSQAVGRSSFYCLEYFPSQMLRTGNNFQFSYEFENVPFHSSYAHSQSLDRLMNPLIDQYLYYLSKTINGSGQNQQTLKFSVAGPSNMAVQGRNYIPGPSYRQQRVSTTVTQNNNSEFAWPGASSWALNGRNSLMNPGPAMASHKEGEDRFFPLSGSLIFGKQGTGRDNVDADKVMITNEEEIKTTNPVATESYGQVATNHQSAQAQAQTGWVQNQGILPGMVWQDRDVYLQGPIWAKIPHTDGNFHPSPLMGGFGMKHPPPQILIKNTPVPADPPTAFNKDKLNSFITQYSTGQVSVEIEWELQKENSKRWNPEIQYTSNYYKSNNVEFAVNTEGV

SEQ ID NO: 90 - protein, 720 aa, Adeno Associated Virus 9
MAADGYLPDWLEDNLSEGIREWWALKPGAPQPKANQQHQDNARAAVLPGYKYLGPGNGLDKGEPVNAADAAALEHDKAYDQQLKAGDNPYLKYNHADAEFQERLKEDTSFGGNLGRAVFQAKKRLLEPLGLVEEAAKTAPGKKRPVEQSPQEPDSSAGIGKSGAQPAKKRLNFGQTGDTESVPDPQPIGEPPAAPSGVGSLTMASGGGAPVADNNEGADGVGSSSGNWHCDSQWLGDRVITTSTRTWALPTYNNHLYKQISNSTSGGSSNDNAYFGYSTPWGYFDFNRFHCHFSPRDWQRLINNNWGFRPKRLNFKLFNIQVKEVTDNNGVKTIANNLTSTVQVFTDSDYQLPYVLGSAHEGCLPPFPADVFMIPQYGYLTLNDGSQAVGRSSFYCLEYFPSQMLRTGNNFQFSYEFENVPFHSSYAHSQSLDRLMNPLIDQYLYYLSKTINGSGQNQQTLKFSVAGPSNMAVQGRNYIPGPSYRQQRVSTTVTQNNNSEFAWPGASSWALNGRNSLMNPGPAMASHKEGEDRFFPLSGSLIFGKQGTGRDNVDADKVMITNEEEIKTTNPVATESYGQVATNHQSAQAQAQTGWVQNQGILPGMVWQDRDVYLQGPIWAKIPHTDGNFHPSPLMGGFGMKHPPPQILIKNTPVPADPPTAFNKDKLNSFITQYSTGQVSVEIEWELQKENSKRWNPEIQYTSNYYKSNNVEFAVNTEGV

SEQ ID NO: 91 - protein, 720 aa, Adeno Associated Virus 9
MAADGYLPDWLEDNLSEGIREWWALKPGAPQPKANQQHQDNARGLVLPGYKYLGPGNGLDKGEPVNAADAAALEHDKAYDQQLKAGDNPYLKYNHADAEFQERLKEDTSFGGNLGRAVFQAKKRLLEPLGLVEEAAKTAPGKKRPVEQSPQEPDSSAGIGKSGAQPAKKRLNFGQTGDTESVPDPQPIGEPPAAPSGVGSLTMASGGGAPVADNNEGADGVGSSSGNWHCDSQWLGDRVITTSTRTWALPTYNNHLYKQISNSTSGGAANDNAYFGYSTPWGYFDFNRFHCHFSPRDWQRLINNNWGFRPKRLNFKLFNIQVKEVTDNNGVKTIANNLTSTVQVFTDSDYQLPYVLGSAHEGCLPPFPADVFMIPQYGYLTLNDGSQAVGRSSFYCLEYFPSQMLRTGNNFQFSYEFENVPFHSSYAHSQSLDRLMNPLIDQYLYYLSKTINGSGQNQQTLKFSVAGPSNMAVQGRNYIPGPSYRQQRVSTTVTQNNNSEFAWPGASSWALNGRNSLMNPGPAMASHKEGEDRFFPLSGSLIFGKQGTGRDNVDADKVMITNEEEIKTTNPVATESYGQVATNHQSAQAQAQTGWVQNQGILPGMVWQDRDVYLQGPIWAKIPHTDGNFHPSPLMGGFGMKHPPPQILIKNTPVPADPPTAFNKDKLNSFITQYSTGQVSVEIEWELQKENSKRWNPEIQYTSNYYKSNNVEFAVNTEGV

SEQ ID NO: 92 - protein, 720 aa, Adeno Associated Virus 9
MAADGYLPDWLEDNLSEGIREWWALKPGAPQPKANQQHQDNARGLVLPGYKYLGPGNAADKGEPVNAADAAALEHDKAYDQQLKAGDNPYLKYNHADAEFQERLKEDTSFGGNLGRAVFQAKKRLLEPLGLVEEAAKTAPGKKRPVEQSPQEPDSSAGIGKSGAQPAKKRLNFGQTGDTESVPDPQPIGEPPAAPSGVGSLTMASGGGAPVADNNEGADGVGSSSGNWHCDSQWLGDRVITTSTRTWALPTYNNHLYKQISNSTSGGSSNDNAYFGYSTPWGYFDFNRFHCHFSPRDWQRLINNNWGFRPKRLNFKLFNIQVKEVTDNNGVKTIANNLTSTVQVFTDSDYQLPYVLGSAHEGCLPPFPADVFMIPQYGYLTLNDGSQAVGRSSFYCLEYFPSQMLRTGNNFQFSYEFENVPFHSSYAHSQSLDRLMNPLIDQYLYYLSKTINGSGQNQQTLKFSVAGPSNMAVQGRNYIPGPSYRQQRVSTTVTQNNNSEFAWPGASSWALNGRNSLMNPGPAMASHKEGEDRFFPLSGSLIFGKQGTGRDNVDADKVMITNEEEIKTTNPVATESYGQVATNHQSAQAQAQTGWVQNQGILPGMVWQDRDVYLQGPIWAKIPHTDGNFHPSPLMGGFGMKHPPPQILIKNTPVPADPPTAFNKDKLNSFITQYSTGQVSVEIEWELQKENSKRWNPEIQYTSNYYKSNNVEFAVNTEGV

SEQ ID NO: 93 - protein, 720 aa, Adeno Associated Virus 9
MAADGYLPDWLEDNLSEGIREWWALKPGAPQPKANQQHQDNARGLVLPGYKYLGPGNGLDKGEPVNAADAAALEHDKAYDQQLKAGDNPYLKYNHADAEFQERLKEDTSFGGNLGRAVFQAKKRLLEPLGLVEEAAKTAPGKKRPVEQSPQEPDSSAGIGKSGAQPAKKRLNFGQTGDTESVPDPQPIGEPPAAPSGVGSLTMASGGGAPVADNNEGADGVGSSSGNWHCDSQWLGDRVITTSTRTWALPTYNNHLYKQISNSTSGGSSNDNAYFGYSTPWGYFDFNRFHCHFSPRDWQRLINNNWGFRPKRLNFKLFNIQVKEVTDNNGVKTAANNLTSTVQVFTDSDYQLPYVLGSAHEGCLPPFPADVFMIPQYGYLTLNDGSQAVGRSSFYCLEYFPSQMLRTGNNFQFSYEFENVPFHSSYAHSQSLDRLMNPLIDQYLYYLSKTINGSGQNQQTLKFSVAGPSNMAVQGRNYIPGPSYRQQRVSTTVTQNNNSEFAWPGASSWALNGRNSLMNPGPAMASHKEGEDRFFPLSGSLIFGKQGTGRDNVDADKVMITNEEEIKTTNPVATESYGQVATNHQSAQAQAQTGWVQNQGILPGMVWQDRDVYLQGPIWAKIPHTDGNFHPSPLMGGFGMKHPPPQILIKNTPVPADPPTAFNKDKLNSFITQYSTGQVSVEIEWELQKENSKRWNPEIQYTSNYYKSNNVEFAVNTEGV

SEQ ID NO: 94 - protein, 720 aa, Adeno Associated Virus 9
MAADGYLPDWLEDNLSEGIREWWALKPGAPQPKANQQHQDNARGLVLPGYKYLGPGNGLDKGEPVNAADAAALEHDKAYDQQLKAGDNPYLKYNHADAEFQERLKEDTSFGGNLGRAVFQAKKRLLEPLGLVEEAAKTAPGKKRPVEQSPQEPDSSAGIGKSGAQPAKKRLNFGQTGDTESVPDPQPIGEPPAAPSGVGSLTMASGGGAPVADNNEGADGVGSSSGNWHCDSQWLGDRVITTSTRTWALPTYNNHLYAAISNSTSGGSSNDNAYFGYSTPWGYFDFNRFHCHFSPRDWQRLINNNWGFRPKRLNFKLFNIQVKEVTDNNGVKTIANNLTSTVQVFTDSDYQLPYVLGSAHEGCLPPFPADVFMIPQYGYLTLNDGSQAVGRSSFYCLEYFPSQMLRTGNNFQFSYEFENVPFHSSYAHSQSLDRLMNPLIDQYLYYLSKTINGSGQNQQTLKFSVAGPSNMAVQGRNYIPGPSYRQQRVSTTVTQNNNSEFAWPGASSWALNGRNSLMNPGPAMASHKEGEDRFFPLSGSLIFGKQGTGRDNVDADKVMITNEEEIKTTNPVATESYGQVATNHQSAQAQAQTGWVQNQGILPGMVWQDRDVYLQGPIWAKIPHTDGNFHPSPLMGGFGMKHPPPQILIKNTPVPADPPTAFNKDKLNSFITQYSTGQVSVEIEWELQKENSKRWNPEIQYTSNYYKSNNVEFAVNTEGV

SEQ ID NO: 95 - protein, 720 aa, Adeno Associated Virus 9
MAADGYLPDWLEDNLSEGIREWWALKPGAPQPKANQQHQDNARGLVLPGYKYLGPGNGLDKGEPVNAADAAALEHDKAYDQQLKAGDNPYLKYNHADAEFQERLKEDTSFGGNLGRAVFQAKKRLLEPLGLVEEAAKTAPGKKRPVEQSPQEPDSSAGIGKSGAQPAKKRLNFGQTGDTESVPDPQPIGEPPAAPSGVGSLTMASGGGAPVADNNEGADGVGSSSGNWHCDSQWLGDRVITTSTRTWALPTYNNHLYKQISNSTSGGSSNDAAYFGYSTPWGYFDFNRFHCHFSPRDWQRLINNNWGFRPKRLNFKLFNIQVKEVTDNNGVKTIANNLTSTVQVFTDSDYQLPYVLGSAHEGCLPPFPADVFMIPQYGYLTLNDGSQAVGRSSFYCLEYFPSQMLRTGNNFQFSYEFENVPFHSSYAHSQSLDRLMNPLIDQYLYYLSKTINGSGQNQQTLKFSVAGPSNMAVQGRNYIPGPSYRQQRVSTTVTQNNNSEFAWPGASSWALNGRNSLMNPGPAMASHKEGEDRFFPLSGSLIFGKQGTGRDNVDADKVMITNEEEIKTTNPVATESYGQVATNHQSAQAQAQTGWVQNQGILPGMVWQDRDVYLQGPIWAKIPHTDGNFHPSPLMGGFGMKHPPPQILIKNTPVPADPPTAFNKDKLNSFITQYSTGQVSVEIEWELQKENSKRWNPEIQYTSNYYKSNNVEFAVNTEGV

SEQ ID NO: 96 - protein, 720 aa, Adeno Associated Virus 9
MAADGYLPDWLEDNLSEGIREWWALKPGAPQPKANQQHQDNARGLVLPGYKYLGPGNGLDKAAPVNAADAAALEHDKAYDQQLKAGDNPYLKYNHADAEFQERLKEDTSFGGNLGRAVFQAKKRLLEPLGLVEEAAKTAPGKKRPVEQSPQEPDSSAGIGKSGAQPAKKRLNFGQTGDTESVPDPQPIGEPPAAPSGVGSLTMASGGGAPVADNNEGADGVGSSSGNWHCDSQWLGDRVITTSTRTWALPTYNNHLYKQISNSTSGGSSNDNAYFGYSTPWGYFDFNRFHCHFSPRDWQRLINNNWGFRPKRLNFKLFNIQVKEVTDNNGVKTIANNLTSTVQVFTDSDYQLPYVLGSAHEGCLPPFPADVFMIPQYGYLTLNDGSQAVGRSSFYCLEYFPSQMLRTGNNFQFSYEFENVPFHSSYAHSQSLDRLMNPLIDQYLYYLSKTINGSGQNQQTLKFSVAGPSNMAVQGRNYIPGPSYRQQRVSTTVTQNNNSEFAWPGASSWALNGRNSLMNPGPAMASHKEGEDRFFPLSGSLIFGKQGTGRDNVDADKVMITNEEEIKTTNPVATESYGQVATNHQSAQAQAQTGWVQNQGILPGMVWQDRDVYLQGPIWAKIPHTDGNFHPSPLMGGFGMKHPPPQILIKNTPVPADPPTAFNKDKLNSFITQYSTGQVSVEIEWELQKENSKRWNPEIQYTSNYYKSNNVEFAVNTEGV

SEQ ID NO: 97 - protein, 720 aa, Adeno Associated Virus 9
MAADGYLPDWLEDNLSEGIREWWALKPGAPQPKANQQHQDNARGLVLPGYKYLGPGNGLDKGEPVNAADAAALEHDKAYDQQLKAGDNPYLKYNHADAEFQERLKEDTSFGGNLGRAVFQAKKRLLEPLGLVEEAAKTAPGKKRPVEQSPQEPDSSAGIGKSGAQPAKKAANFGQTGDTESVPDPQPIGEPPAAPSGVGSLTMASGGGAPVADNNEGADGVGSSSGNWHCDSQWLGDRVITTSTRTWALPTYNNHLYKQISNSTSGGSSNDNAYFGYSTPWGYFDFNRFHCHFSPRDWQRLINNNWGFRPKRLNFKLFNIQVKEVTDNNGVKTIANNLTSTVQVFTDSDYQLPYVLGSAHEGCLPPFPADVFMIPQYGYLTLNDGSQAVGRSSFYCLEYFPSQMLRTGNNFQFSYEFENVPFHSSYAHSQSLDRLMNPLIDQYLYYLSKTINGSGQNQQTLKFSVAGPSNMAVQGRNYIPGPSYRQQRVSTTVTQNNNSEFAWPGASSWALNGRNSLMNPGPAMASHKEGEDRFFPLSGSLIFGKQGTGRDNVDADKVMITNEEEIKTTNPVATESYGQVATNHQSAQAQAQTGWVQNQGILPGMVWQDRDVYLQGPIWAKIPHTDGNFHPSPLMGGFGMKHPPPQILIKNTPVPADPPTAFNKDKLNSFITQYSTGQVSVEIEWELQKENSKRWNPEIQYTSNYYKSNNVEFAVNTEGV

SEQ ID NO: 98 - protein, 720 aa, Adeno Associated Virus 9
MAADGYLPDWLEDNLSEGIREWWALKPGAPQPKANQQHQDNARGLVLPGYKYLGPGNGLDKGEPVNAADAAALEHDKAYDQQLKAGDNPYLKYNHADAEFQERLKEDTSFGGNLGRAVFQAKKRLLEPLGLVEEAAKTAPGKKRPVEQSPQEPDSSAGIGKSGAQPAKKRLNFGQTGDTESVPDPQPIGEPPAAPSGVGSLTMASGGGAPVADNNEGADGVGSSSGNWHCDSQWLGDRVITTSTRTWALPTYNAALYKQISNSTSGGSSNDNAYFGYSTPWGYFDFNRFHCHFSPRDWQRLINNNWGFRPKRLNFKLFNIQVKEVTDNNGVKTIANNLTSTVQVFTDSDYQLPYVLGSAHEGCLPPFPADVFMIPQYGYLTLNDGSQAVGRSSFYCLEYFPSQMLRTGNNFQFSYEFENVPFHSSYAHSQSLDRLMNPLIDQYLYYLSKTINGSGQNQQTLKFSVAGPSNMAVQGRNYIPGPSYRQQRVSTTVTQNNNSEFAWPGASSWALNGRNSLMNPGPAMASHKEGEDRFFPLSGSLIFGKQGTGRDNVDADKVMITNEEEIKTTNPVATESYGQVATNHQSAQAQAQTGWVQNQGILPGMVWQDRDVYLQGPIWAKIPHTDGNFHPSPLMGGFGMKHPPPQILIKNTPVPADPPTAFNKDKLNSFITQYSTGQVSVEIEWELQKENSKRWNPEIQYTSNYYKSNNVEFAVNTEGV

SEQ ID NO: 99 - protein, 720 aa, Adeno Associated Virus 9
MAADGYLPDWLEDNLSEGIREWWALKPGAPQPKANQQHQDNARGLVLPGYKYLGPGNGLDKGEPVNAADAAALEHDKAYDQQLKAGDNPYLKYAAADAEFQERLKEDTSFGGNLGRAVFQAKKRLLEPLGLVEEAAKTAPGKKRPVEQSPQEPDSSAGIGKSGAQPAKKRLNFGQTGDTESVPDPQPIGEPPAAPSGVGSLTMASGGGAPVADNNEGADGVGSSSGNWHCDSQWLGDRVITTSTRTWALPTYNNHLYKQISNSTSGGSSNDNAYFGYSTPWGYFDFNRFHCHFSPRDWQRLINNNWGFRPKRLNFKLFNIQVKEVTDNNGVKTIANNLTSTVQVFTDSDYQLPYVLGSAHEGCLPPFPADVFMIPQYGYLTLNDGSQAVGRSSFYCLEYFPSQMLRTGNNFQFSYEFENVPFHSSYAHSQSLDRLMNPLIDQYLYYLSKTINGSGQNQQTLKFSVAGPSNMAVQGRNYIPGPSYRQQRVSTTVTQNNNSEFAWPGASSWALNGRNSLMNPGPAMASHKEGEDRFFPLSGSLIFGKQGTGRDNVDADKVMITNEEEIKTTNPVATESYGQVATNHQSAQAQAQTGWVQNQGILPGMVWQDRDVYLQGPIWAKIPHTDGNFHPSPLMGGFGMKHPPPQILIKNTPVPADPPTAFNKDKLNSFITQYSTGQVSVEIEWELQKENSKRWNPEIQYTSNYYKSNNVEFAVNTEGV

SEQ ID NO: 100 - protein, 720 aa, Adeno Associated Virus 9
MAADGYLPDWLEDNLSEGIREWWALKPGAPQPKANQQHQDNARGLVLPGYKYLGPGNGLDKGEPVNAADAAALEHDKAYDQQLKAAANPYLKYNHADAEFQERLKEDTSFGGNLGRAVFQAKKRLLEPLGLVEEAAKTAPGKKRPVEQSPQEPDSSAGIGKSGAQPAKKRLNFGQTGDTESVPDPQPIGEPPAAPSGVGSLTMASGGGAPVADNNEGADGVGSSSGNWHCDSQWLGDRVITTSTRTWALPTYNNHLYKQISNSTSGGSSNDNAYFGYSTPWGYFDFNRFHCHFSPRDWQRLINNNWGFRPKRLNFKLFNIQVKEVTDNNGVKTIANNLTSTVQVFTDSDYQLPYVLGSAHEGCLPPFPADVFMIPQYGYLTLNDGSQAVGRSSFYCLEYFPSQMLRTGNNFQFSYEFENVPFHSSYAHSQSLDRLMNPLIDQYLYYLSKTINGSGQNQQTLKFSVAGPSNMAVQGRNYIPGPSYRQQRVSTTVTQNNNSEFAWPGASSWALNGRNSLMNPGPAMASHKEGEDRFFPLSGSLIFGKQGTGRDNVDADKVMITNEEEIKTTNPVATESYGQVATNHQSAQAQAQTGWVQNQGILPGMVWQDRDVYLQGPIWAKIPHTDGNFHPSPLMGGFGMKHPPPQILIKNTPVPADPPTAFNKDKLNSFITQYSTGQVSVEIEWELQKENSKRWNPEIQYTSNYYKSNNVEFAVNTEGV

SEQ ID NO: 101 - protein, 720 aa, Adeno Associated Virus 9
MAADGYLPDWLEDNLSEGIREWWALKPGAPQPKANQQHQDNARGLVLPGYKYLGPGNGLDKGEPVNAADAAALEHDKAYDQQLKAGDAAYLKYNHADAEFQERLKEDTSFGGNLGRAVFQAKKRLLEPLGLVEEAAKTAPGKKRPVEQSPQEPDSSAGIGKSGAQPAKKRLNFGQTGDTESVPDPQPIGEPPAAPSGVGSLTMASGGGAPVADNNEGADGVGSSSGNWHCDSQWLGDRVITTSTRTWALPTYNNHLYKQISNSTSGGSSNDNAYFGYSTPWGYFDFNRFHCHFSPRDWQRLINNNWGFRPKRLNFKLFNIQVKEVTDNNGVKTIANNLTSTVQVFTDSDYQLPYVLGSAHEGCLPPFPADVFMIPQYGYLTLNDGSQAVGRSSFYCLEYFPSQMLRTGNNFQFSYEFENVPFHSSYAHSQSLDRLMNPLIDQYLYYLSKTINGSGQNQQTLKFSVAGPSNMAVQGRNYIPGPSYRQQRVSTTVTQNNNSEFAWPGASSWALNGRNSLMNPGPAMASHKEGEDRFFPLSGSLIFGKQGTGRDNVDADKVMITNEEEIKTTNPVATESYGQVATNHQSAQAQAQTGWVQNQGILPGMVWQDRDVYLQGPIWAKIPHTDGNFHPSPLMGGFGMKHPPPQILIKNTPVPADPPTAFNKDKLNSFITQYSTGQVSVEIEWELQKENSKRWNPEIQYTSNYYKSNNVEFAVNTEGV

SEQ ID NO: 102 - protein, 720 aa, Adeno Associated Virus 9
MAADGYLPDWLEDNLSEGIREWWALKPGAPQPKANQQHQDNARGLVLPGYKYLGPGNGLDKGEPVAAADAAALEHDKAYDQQLKAGDNPYLKYNHADAEFQERLKEDTSFGGNLGRAVFQAKKRLLEPLGLVEEAAKTAPGKKRPVEQSPQEPDSSAGIGKSGAQPAKKRLNFGQTGDTESVPDPQPIGEPPAAPSGVGSLTMASGGGAPVADNNEGADGVGSSSGNWHCDSQWLGDRVITTSTRTWALPTYNNHLYKQISNSTSGGSSNDNAYFGYSTPWGYFDFNRFHCHFSPRDWQRLINNNWGFRPKRLNFKLFNIQVKEVTDNNGVKTIANNLTSTVQVFTDSDYQLPYVLGSAHEGCLPPFPADVFMIPQYGYLTLNDGSQAVGRSSFYCLEYFPSQMLRTGNNFQFSYEFENVPFHSSYAHSQSLDRLMNPLIDQYLYYLSKTINGSGQNQQTLKFSVAGPSNMAVQGRNYIPGPSYRQQRVSTTVTQNNNSEFAWPGASSWALNGRNSLMNPGPAMASHKEGEDRFFPLSGSLIFGKQGTGRDNVDADKVMITNEEEIKTTNPVATESYGQVATNHQSAQAQAQTGWVQNQGILPGMVWQDRDVYLQGPIWAKIPHTDGNFHPSPLMGGFGMKHPPPQILIKNTPVPADPPTAFNKDKLNSFITQYSTGQVSVEIEWELQKENSKRWNPEIQYTSNYYKSNNVEFAVNTEGV

SEQ ID NO: 103 - protein, 720 aa, Adeno Associated Virus 9
MAADGYLPDWLEDNLSEGIREWWALKPGAPQPKANQQHQDNARGLVLPGYKYLGPGNGLDKGEPVNAADAAALEHDKAYDQAAKAGDNPYLKYNHADAEFQERLKEDTSFGGNLGRAVFQAKKRLLEPLGLVEEAAKTAPGKKRPVEQSPQEPDSSAGIGKSGAQPAKKRLNFGQTGDTESVPDPQPIGEPPAAPSGVGSLTMASGGGAPVADNNEGADGVGSSSGNWHCDSQWLGDRVITTSTRTWALPTYNNHLYKQISNSTSGGSSNDNAYFGYSTPWGYFDFNRFHCHFSPRDWQRLINNNWGFRPKRLNFKLFNIQVKEVTDNNGVKTIANNLTSTVQVFTDSDYQLPYVLGSAHEGCLPPFPADVFMIPQYGYLTLNDGSQAVGRSSFYCLEYFPSQMLRTGNNFQFSYEFENVPFHSSYAHSQSLDRLMNPLIDQYLYYLSKTINGSGQNQQTLKFSVAGPSNMAVQGRNYIPGPSYRQQRVSTTVTQNNNSEFAWPGASSWALNGRNSLMNPGPAMASHKEGEDRFFPLSGSLIFGKQGTGRDNVDADKVMITNEEEIKTTNPVATESYGQVATNHQSAQAQAQTGWVQNQGILPGMVWQDRDVYLQGPIWAKIPHTDGNFHPSPLMGGFGMKHPPPQILIKNTPVPADPPTAFNKDKLNSFITQYSTGQVSVEIEWELQKENSKRWNPEIQYTSNYYKSNNVEFAVNTEGV

SEQ ID NO: 104 - protein, 720 aa, Adeno Associated Virus 9
MAADGYLPDWLEDNLSEGIREWWALKPGAPQPKANQQHQDNARGLVLPGYKYLGPGNGLAAGEPVNAADAAALEHDKAYDQQLKAGDNPYLKYNHADAEFQERLKEDTSFGGNLGRAVFQAKKRLLEPLGLVEEAAKTAPGKKRPVEQSPQEPDSSAGIGKSGAQPAKKRLNFGQTGDTESVPDPQPIGEPPAAPSGVGSLTMASGGGAPVADNNEGADGVGSSSGNWHCDSQWLGDRVITTSTRTWALPTYNNHLYKQISNSTSGGSSNDNAYFGYSTPWGYFDFNRFHCHFSPRDWQRLINNNWGFRPKRLNFKLFNIQVKEVTDNNGVKTIANNLTSTVQVFTDSDYQLPYVLGSAHEGCLPPFPADVFMIPQYGYLTLNDGSQAVGRSSFYCLEYFPSQMLRTGNNFQFSYEFENVPFHSSYAHSQSLDRLMNPLIDQYLYYLSKTINGSGQNQQTLKFSVAGPSNMAVQGRNYIPGPSYRQQRVSTTVTQNNNSEFAWPGASSWALNGRNSLMNPGPAMASHKEGEDRFFPLSGSLIFGKQGTGRDNVDADKVMITNEEEIKTTNPVATESYGQVATNHQSAQAQAQTGWVQNQGILPGMVWQDRDVYLQGPIWAKIPHTDGNFHPSPLMGGFGMKHPPPQILIKNTPVPADPPTAFNKDKLNSFITQYSTGQVSVEIEWELQKENSKRWNPEIQYTSNYYKSNNVEFAVNTEGV

SEQ ID NO: 105 - protein, 720 aa, Adeno Associated Virus 9
MAADGYLPDWLEDNLSEGIREWWALKPGAPQPKANQQHQDNARGLVLPGYKYLGPGNGLDKGEPVNAADAAALEHDKAYDQQLKAGDNPYLKYNHADAEFQERAAEDTSFGGNLGRAVFQAKKRLLEPLGLVEEAAKTAPGKKRPVEQSPQEPDSSAGIGKSGAQPAKKRLNFGQTGDTESVPDPQPIGEPPAAPSGVGSLTMASGGGAPVADNNEGADGVGSSSGNWHCDSQWLGDRVITTSTRTWALPTYNNHLYKQISNSTSGGSSNDNAYFGYSTPWGYFDFNRFHCHFSPRDWQRLINNNWGFRPKRLNFKLFNIQVKEVTDNNGVKTIANNLTSTVQVFTDSDYQLPYVLGSAHEGCLPPFPADVFMIPQYGYLTLNDGSQAVGRSSFYCLEYFPSQMLRTGNNFQFSYEFENVPFHSSYAHSQSLDRLMNPLIDQYLYYLSKTINGSGQNQQTLKFSVAGPSNMAVQGRNYIPGPSYRQQRVSTTVTQNNNSEFAWPGASSWALNGRNSLMNPGPAMASHKEGEDRFFPLSGSLIFGKQGTGRDNVDADKVMITNEEEIKTTNPVATESYGQVATNHQSAQAQAQTGWVQNQGILPGMVWQDRDVYLQGPIWAKIPHTDGNFHPSPLMGGFGMKHPPPQILIKNTPVPADPPTAFNKDKLNSFITQYSTGQVSVEIEWELQKENSKRWNPEIQYTSNYYKSNNVEFAVNTEGV

SEQ ID NO: 106 - protein, 720 aa, Adeno Associated Virus 8; identical to SEQ ID NO: 31

SEQ ID NO: 107 - protein, 720 aa, Adeno Associated Virus 9
MAADGYLPDWLEDNLSEGIREAWALKPGAPQPKANQQHQDNARGLVLPGYKYLGPGNGLDKGEPVNAADAAALEHDKAYDQQLKAGDNPYLKYNHADAEFQERLKEDTSFGGNLGRAVFQAKKRLLEPLGLVEEAAKTAPGKKRPVEQSPQEPDSSAGIGKSGAQPAKKRLNFGQTGDTESVPDPQPIGEPPAAPSGVGSLTMASGGGAPVADNNEGADGVGSSSGNWHCDSQWLGDRVITTSTRTWALPTYNNHLYKQISNSTSGGSSNDNAYFGYSTPWGYFDFNRFHCHFSPRDWQRLINNNWGFRPKRLNFKLFNIQVKEVTDNNGVKTIANNLTSTVQVFTDSDYQLPYVLGSAHEGCLPPFPADVFMIPQYGYLTLNDGSQAVGRSSFYCLEYFPSQMLRTGNNFQFSYEFENVPFHSSYAHSQSLDRLMNPLIDQYLYYLSKTINGSGQNQQTLKFSVAGPSNMAVQGRNYIPGPSYRQQRVSTTVTQNNNSEFAWPGASSWALNGRNSLMNPGPAMASHKEGEDRFFPLSGSLIFGKQGTGRDNVDADKVMITNEEEIKTTNPVATESYGQVATNHQSAQAQAQTGWVQNQGILPGMVWQDRDVYLQGPIWAKIPHTDGNFHPSPLMGGFGMKHPPPQILIKNTPVPADPPTAFNKDKLNSFITQYSTGQVSVEIEWELQKENSKRWNPEIQYTSNYYKSNNVEFAVNTEGV

SEQ ID NO: 108 - protein, 743 aa, Adeno Associated Virus 9
MAADGYLPDWLEDNLSEGIREWWALKPGAPQPKANQQHQDNARGLVLPGYKYLGPGNGLDKGEPVNAADAAALEHDKAYDQQLKAGDNPYLKYNHADAEFQERLKEDTSFGGNLGRAVFQAKKRLLEPLGLVEEAAKTAPGKKRPVEQSPQEPDSSAGIGKSGAQPAKKRLNFGQTGDTESVPDPQPIGEPPAAPSGVGSLTMASGGGAPVADNNEGADGVGSSSGNWHCDSQWLGDRVITTSTRTWALPTYNNHLYKQISNSTSGGSSNDAAYFGYSTPWGYFDFNRFHCHFSPRDWQRLINNNWGFRPKRLNFKLFNIQVKEVTDNNGVKTIANNLTSTVQVFTDSDYQLPYVLGSAHEGCLPPFPADVFMIPQYGYLTLNDGSQAVGRSSFYCLEYFPSQMLRTGNNFQFSYEFENVPFHSSYAHSQSLDRLMNPLIDQYLYYLSRTINGSGQNQQTLKFSVAGPSNMAVQGRNYIPGPSYRQQRVSTTVTQNNNSEFAWPGASSWALNGRNSLMNPGPAMASHKEGEDRFFPLSGSLIFGKQGTGRDNVDADKVMITNEEEIKTTNPVATESYGQVATNHQSAQTLAVPFKAQAQTGWVQNQGILPGMVWQDRDVYLQGPIWAKIPHTDGNFHPSPLMGGFGMKHPPPQILIKNTPVPADPPTAFNKDKLNSFITQYSTGQVSVEIEWELQKENSKRWNPEIQYTSNYYKSNNVEFAVNTEGVYSEPRPIGTRYLTRNL
